(19) United States
(12) Patent Application Publication
(10) Pub. No.: US 2022/0154163 A1
(43) Pub. Date: May 19, 2022

(54) HIGH-PRECISION BASE EDITORS

(71) Applicant: MAX-PLANCK-GESELLSCHAFT ZUR FÖRDERUNG DER WISSENSCHAFTEN E.V., München (DE)

(72) Inventors: Ralph BOCK, Schwielowsee (DE); Daniel KARCHER, Potsdam (DE); Junjie TAN, Potsdam (DE)

(21) Appl. No.: 17/438,543

(22) PCT Filed: Jan. 30, 2020
(86) PCT No.: PCT/EP2020/052368

§ 371 Date: Sep. 13, 2021

(30) Foreign Application Priority Data
Mar. 13, 2019 (EP) PCT/EP2019/056335

(51) Int. Cl. C12N 9/78; C12N 9/22; C12N 15/11; C12N 15/86; C12N 15/90; A61K 31/7088; A61K 38/46; A61K 38/50

(52) U.S. Cl. CPC C12N 9/78; C12N 9/22; C12N 15/11; C12Y 305/04; C12N 15/86; C12N 15/907; C12N 2710/16143; A61K 38/465; A61K 38/50; C12N 2310/20; C12N 2800/80; C12Y 305/04005; A61K 31/7088

(57) ABSTRACT

The present invention relates to a base editing compound comprising or consisting of (a) a Cas protein, and, covalently connected therewith; (b) a nucleobase-modifying enzyme, wherein the covalent connection of (a) and (b) is (i) direct; (ii) provided by a peptide comprising at least one Pro residue, said peptide having a length between 1 and 20 preferably between 1 and 15 amino acids; or (iii) provided by a non-peptidic linker, said non-peptidic linker being a small organic molecule comprising one or more double bonds, one or more triple bonds, and/or one or more aromatic rings.

[0001] The present invention relates to a base editing compound comprising or consisting of (a) a Cas protein, and, covalently connected therewith; (b) a nucleobase-modifying enzyme, wherein the covalent connection of (a) and (b) is (i) direct; (ii) provided by a peptide comprising at least one Pro residue, said peptide having a length between 1 and 20, preferably between 1 and 15 amino acids; or (iii) provided by a non-peptidic linker, said non-peptidic linker being a small organic molecule comprising one or more double bonds, one or more triple bonds, and/or one or more aromatic rings.

[0002] In this specification, a number of documents including patent applications and manufacturer's manuals are cited. The disclosure of these documents, while not considered relevant for the patentability of this invention, is herewith incorporated by reference in its entirety. More specifically, all referenced documents are incorporated by reference to the same extent as if each individual document was specifically and individually indicated to be incorporated by reference.

[0003] CRISPR-Cas systems represent an adaptive immune system in bacteria that promotes antiviral defense (Jinek, M. et al. A programmable dual-RNA-guided DNA endonuclease in adaptive bacterial immunity. Science 337, 816-821 (2012); van der Oost, J., Westra, E. R., Jackson, R. N. & Wiedenheft, B. Unravelling the structural and mechanistic basis of CRISPR-Cas systems. Nat. Rev. Microbiol. 12, 479-492 (2014)). Several such systems, especially the one based on the Cas9 enzyme from Streptococcus pyogenes (SpCas9), have been successfully repurposed for genome editing in a wide range of organisms (Mali, P. et al. RNA-guided human genome engineering via Cas9. Science 339, 823-826 (2013); Jiang,

[0004] W., Bikard, D., Cox, D., Zhang, F. & Marraffini, L. A. RNA-guided editing of bacterial genomes using CRISPR-Cas systems. Nat. Biotechnol. 31, 233-239 (2013); Nekrasov, V., Staskawicz, B., Weigel, D., Jones, J. D. G. & Kamoun, S. Targeted mutagenesis in the model plant Nicotiana benthamiana using Cas9 RNAguided endonuclease. Nat. Biotechnol. 31, 691-693 (2013); Doudna, J. A. & Charpentier, E. The new frontier of genome engineering with CRISPR-Cas9. Science 346, 1258096 (2014); Wright, A. V., Nunez, J. K. & Doudna, J. A. Biology and applications of CRISPR systems: harnessing nature's toolbox for genome engineering. Cell 164, 29-44 (2016); Komor, A. C., Badran, A. H. & Liu, D. R. CRISPR-based technologies for the manipulation of eukaryotic genomes. Cell 168, 20-36 (2017)). Cas9 is an endonuclease with two nuclease domains, referred to as HNH and RuvC, each cleaving one strand of the target DNA (Jinek, M. et al. Structures of Cas9 endonucleases reveal RNA-mediated conformational activation. Science 343, 1247997 (2014); Nishimasu, H. et al. Crystal structure of Cas9 in complex with guide RNA and target DNA. Cell 156, 935-949 (2014)). The HNH nuclease cleaves the target strand, and the RuvC nuclease cleaves the non-target strand. Upon repair of the double-strand break, deletions (or insertions) can occur that inactivate the target gene (Cong, L. et al. Multiplex genome engineering using CRISPR/Cas systems. Science 339, 819-823 (2013)).

[0005] Although this method provides a highly efficient tool in functional genomics and is also suitable to reach a limited number of breeding goals by knocking out genes for unwanted traits in crops (Shan, Q. et al. Targeted genome modification of crop plants using a CRISPR-Cas system. Nat. Biotechnol. 31, 686-688 (2013); Zhu, C. et al. Characteristics of genome editing mutations in cereal crops. Trends Plant Sci. 22, 38-52 (2016)), more precise DNA editing tools are needed for all applications requiring introduction of specific base changes into target genes, such as precision breeding and gene therapy. Most hereditary diseases in humans involve single point mutations, the correction of which will require extraordinary accuracy of site-specific editing, ideally without any off-target effects (Mali, P. et al. CAS9 transcriptional activators for target specificity screening and paired nickases for cooperative genome engineering. Nat. Biotechnol. 31, 833-838 (2013); Hsu, P. D. et al. DNA targeting specificity of RNA-guided Cas9 nucleases. Nat. Biotechnol. 31, 827-832 (2013)).

[0006] Recently, base editors have been developed that convert Cas endonucleases into programmable nucleotide deaminases (Komor, A. C., Kim, Y. B., Packer, M. S., Zuris, J. A. & Liu, D. R. Programmable editing of a target base in genomic DNA without doublestranded DNA cleavage. Nature 533, 420-424 (2016); Nishida, K. et al. Targeted nucleotide editing using hybrid prokaryotic and vertebrate adaptive immune systems. Science 353, 1248 (2016) ; Gaudelli, N. M. et al. Programmable base editing of A.T to G.C in genomic DNA without DNA cleavage. Nature 551, 464-471 (2017)), thus facilitating the introduction of C-to-T mutations (by C-to-U deamination) or A-to-G mutations (by A-to-I deamination) without induction of a double-strand break (Rees, H. A. et al. Improving the DNA specificity and applicability of base editing through protein engineering and protein delivery. Nat. Commun. 8, 15790 (2017); Kim, J. -S. Precision genome engineering through adenine and cytosine base editing. Nat. Plants 4, 148-151 (2018)).

[0007] As a rule, base editors edit the non-target strand. Komor et al. (loc. cit.) introduce the notion of three generations of base editors. First generation base editors (BE1) make use of a dead Cas9 protein, i.e. a Cas9 protein where both HNH and RuvC endonucleases are inactivated. A typical mutation which inactivates RuvC is D10A. A typical mutation which inactivates HNH is H840A. Fused to such dead Cas9 protein, base editors of the first generation comprise a cytidine deaminase enzyme. The cytidine deaminase enzyme is generally located N-terminally and connected to the dead Cas9 protein via linker.

[0008] Subsequently, it has been discovered that endogenous base-excision repair (BER) mechanisms cause reversion of any base editing performed by the cytidine deaminase. In order to control such BER, a third fusion partner has been introduced, namely an inhibitor of base-excision repair such as a uracil DNA glycosylase inhibitor (UGI). Accordingly, such second generation base editors (BE2) are tripartite fusion proteins. As regards the Cas9 protein, use is made of dead Cas9.

[0009] In a next step, it has been discovered that eukaryotic mismatch repair (MMR) can be biased towards replacing G (which base paired with C prior to the action of the cytidine deaminase) with A. It turned out that this can be achieved by using a Cas9 nickase instead of dead Cas9, wherein in the Cas9 nickase to be used in base editors, the His at position 840 which is within the HNH sequence is brought back and only the Asp10Ala mutation in the RuvC domain is retained. A Cas9 nickase (nCas9) cleaves only one of the two strands, wherein the specific nCas9^{D10A} only nicks the target strand which is the non-edited strand. Base editors of the third generation (BE3), a preferred starting point for the developments leading to the present invention, accordingly comprise a nickase form of SpCas9 (nSpCas9, to stimulate cellular DNA mismatch repair) fused to a nucleobase deaminase enzyme as well as an inhibitor of base excision repair such as uracil glycosylase inhibitor (UGI).

[0010] The current severe limitation in the applicability of base editors lies in their low site selectivity. For example, C-to-T base editors can potentially edit any C that resides in an approximately 4-5 nt (in some systems up to 9 nt) wide window within the protospacer (Komor, A. C., Kim, Y. B., Packer, M. S., Zuris, J. A. & Liu, D. R. Programmable editing of a target base in genomic DNA without doublestranded DNA cleavage. Nature 533, 420-424 (2016); Nishida, K. et al. Targeted nucleotide editing using hybrid prokaryotic and vertebrate adaptive immune systems. Science 353, 1248 (2016); Zong, Y. et al. Precise base editing in rice, wheat and maize with a Cas9-cytidine deaminase fusion. Nat. Biotechnol. 35, 438-440 (2017)). However, some human disease-associated alleles such as the Alzheimer's disease-associated gene APOE4 and the β-thalassemia locus HBB have multiple Cs around the targeted C within the activity window, and the editing of additional Cs can potentially cause deleterious effects ((Komor, A. C., Kim, Y. B., Packer, M. S., Zuris, J. A. & Liu, D. R. Programmable editing of a target base in genomic DNA without double-stranded DNA cleavage. Nature 533, 420-424 (2016); Liang, P. et al. Correction of β-thalassemia mutant by base editor in human embryos. Protein Cell 8, 811-822 (2017)).

[0011] Another limitation of the known base editors is the fact that the Cas system, for proper recognition of a target site, requires presence of a so-called “protospacer adjacent motif (PAM)”. In the case of Cas9, the canonical PAM is 5′-NGG-3′, wherein N may be any base. This limits the applicability of Cas9-based base editors to target sites comprising such PAM. The majority of the described base editors are Cas9-based base editors.

[0012] In view of the shortcomings of the prior art, the technical problem underlying the present invention can be seen as a provision of improved means and methods for the editing of nucleobases.

[0013] This technical problem has been solved by the subject-matter of the claims.

[0014] Accordingly, in a first aspect, the present invention relates to a base editing compound comprising or consisting of (a) a Cas protein, and, covalently connected therewith; (b) a nucleobase-modifying enzyme, wherein the covalent connection of (a) and (b) is (i) direct; (ii) provided by a peptide comprising at least one Pro residue, said peptide having a length between 1 and 20, preferably between 1 and 15 amino acids; or (iii) provided by a non-peptidic linker, said non-peptidic linker being a small organic molecule comprising one or more double bonds, one or more triple bonds, and/or one or more aromatic rings.

[0015] The term “base editing” refers to the capability of converting a nucleobase into another nucleobase. Nucleobases in accordance with the disclosure are adenine, guanine, inosine, cytosine, thymidine and uracil. Preferably, a purine is converted into another purine, and a pyrimidine into another pyrimidine. Examples of the former include the conversion of adenine to inosine. Inosine may be subsequently converted into guanine, e.g., in the course of DNA replication. An example of the latter is the conversion of cytosine to thymine or uracil. Also envisaged is the conversion of guanine to adenine and of thymidine to cytidine.

[0016] The term “base editing” also extends to the capability of methylating or demethylating nucleobases. For example, side-specific cytosine methylation or demethylation is a means of introducing epigenetic changes, also referred to as “epigenome-editing”. Suitable enzymes are disclosed further below.

[0017] Base editing compounds in accordance with the present invention are or are predominantly polypeptidic in nature. More specifically, base editing compounds in accordance with the invention comprise at least two components (a) and (b), a targeting component (a) and an editing component (b). The targeting component makes use of the sequence-dependent recognition of target sites by the CRISPR/Cas system. A targeting component making use of the sequence-dependent recognition of target sites by the CRISPR/Cas system is also referred to as “Cas protein” herein. As such, it is understood that a “Cas protein” in accordance with the invention, when provided with a guide sequence as discussed further below, is capable of associating with a region on a target nucleic acid which is complementary or substantially complementary to said guide nucleic acid. Preferably, it is a Cas nickase (nCas) or a (catalytically) dead Cas (dCas). To the extent the targeting component is a Cas nickase, it preferably exhibits enzymatic activity. Preferably, of the two cleavage activities of a native Cas protein, cleavage activity acting on the non-edited strand is obtained. Not necessarily, but preferably, base editors including base editors of the present invention edit the non-target strand, the term “target strand” in this context referring to the DNA strand which is complementary to the guide RNA of the Cas complex. Accordingly, in the preferred embodiment where Cas is Cas9, and furthermore use is made of nCas9, said nCas9 is nCas9^{D10A}. In other words, the RuvC domain is catalytically inactive. The other nuclease domain (HNH) is active, i.e., there is a His at position 840.

[0018] Using the nomenclature introduced further above, a base editor using a Cas nickase is a base editor of the third generation. Base editors of first and second generation use a dead Cas protein.

[0019] Also preferred is the use of Cas9 variants, more specifically variants of nCas9. These variants include VQR-Cas9, VRER-Cas9, xCas9, and SpCas9-NG. These Cas9 variants are described in more detail in the Examples enclosed herewith and the references cited there.

[0020] Base editors of the third generation (BE3) are preferred, because they contain an inhibitor of base excision repair and make use of a Cas nickase. Corresponding constructs of the present invention contain the abbreviation “BE3”.

[0021] The PAM sequences recognized by these four nCas9 variants are as follows: NGA in case of VQR-Cas9; NGCG in case of VRER-Cas9; NG, GAA and GAT in case of xCas9; and NG in case of SpCas9-NG.

[0022] The other component (b) is capable of catalyzing at least one of the above described nucleobase conversions. Preferred classes of component (b) are cytidine deaminases and adenosine deaminases. Cytidine deaminases are particularly preferred.

[0023] Owing to the fact that the two components are covalently connected to each other, the nucleobase-modifying enzyme will exert its function only in the region of the target nucleic acid recognized by the targeting component.

[0024] The target may be DNA or RNA. Preferably, the target nucleic acid is DNA. The term “target” or “target nucleic acid” refers to the nucleic acid to be edited by the base editing compound of the invention. The term “target site” refers to a sub-sequence within the target where the nucleobase conversion is to occur. The targeting of the target site within the target nucleic acid is effected by the known sequence-dependent recognition mechanism of the CRISPR/Cas system. In particular, and this is subject of embodiments disclosed further below, the base editing compound of the invention is to be used in conjunction with a guide nucleic acid, preferably a guide ribonucleic acid.

[0025] As noted above, the term “target” is also used herein in the context of a “target strand”. The target strand is that strand of the double-stranded DNA which base pairs with the guide RNA.

[0026] In relation to both the Cas nickase and the nucleobase-modifying enzyme, it is preferred that they consist of those residues which are required for their respective function. Flanking residues at either the N-terminus or the C-terminus or both, to the extent they do not significantly contribute to function, are preferably absent. As will become more apparent below, the present inventors discovered that in certain instances significant deletions are possible.

[0027] On the other hand, the present invention may also make use of Cas nickases and nucleobase-modifying enzymes as they are comprised in base editors of the prior art. Such—not truncated (when using the terminology of this disclosure)—constituents are, for example, the Cas9 nickase as set forth by the amino acid sequence of SEQ ID NO: 1, the APOBEC1 deaminase of SEQ ID NO: 3 and the CDA1 deaminase of SEQ ID NO: 5. APOBEC1 and CDA1 are preferred cytidine deaminases.

[0028] The present inventors surprisingly discovered that a fine-tuning of the connection between the two components of the base editing compound is a means of enhancing the precision of base editing. The specific solutions in accordance with the present invention are described by items (i) to (iii) of the first aspect of the invention. Generally speaking, key features of the connection between the two components are (1) limited length, and (2) rigidity.

[0029] It is understood that the term “direct” refers to a linkerless connection of components (a) and (b). Preferably, it refers to a main chain peptide bond between the C-terminus of one of the components and the N-terminus of the other component.

[0030] The term “editing profile” as used herein refers to the editing properties of a base editor such as the base editing compound in accordance with the invention. The notion of the editing profile includes (i) precision, (ii) location of the edited position relative to the PAM motif, and (iii) efficacy. The main focus of the present invention lies on precision, and furthermore on aspect (ii). To explain further, and as described in the introductory section, base editors of the prior art suffer from deficiencies in that the editor, once it has bound to its target site on the target nucleic acid, performs several nucleobase conversions or single-nucleotide conversions at different positions, albeit in a window which is usually less wide than 15 nucleotides. For many applications, in particular in the field of therapy, this is unacceptable. It turns out that the specific linker design in accordance with the invention is a means of sharpening the editing profile or, in other words, increasing editing precision such that a very limited number of nucleobases at a given site are converted. Preferably, exactly one base is converted. Corresponding evidence can be found in the enclosed Examples.

[0031] Having regard to rigidity, the presence of at least one Pro residue in accordance with item (i) is a means of conferring rigidity. To the extent a non-peptidic linker is used, the rigidity conferred by is preferably at least that conferred by a peptidic linker in accordance with item (i). A preferred reference state for defining rigidity of non-peptidic linker is the rigidity of the most preferred peptidic linkers with the sequences PAPAP (SEQ ID NO: 15) and PAPAPAP (SEQ ID NO: 16). Preferred structural implementations of the non-peptidic linker are recited in item (iii).

[0032] In a preferred embodiment, (a) said Cas protein is a Cas nickase or dead Cas, said Cas nickase preferably being Cas9 or Cas12 nickase (nCas9; nCas12), and said dead Cas preferably being dead Cas9 or dead Cas12; and/or (b) said nucleobase-modifying enzyme is selected from a deaminase, a nucleoside synthase, a DNA methyl transferase and a DNA demethylase, said deaminase preferably being selected from the APOBEC, CDA1 or Tad/ADAR families, APOBEC3A (abbreviated as “A3A”) being particularly preferred.

[0033] To the extent use is made of nCas9, it is also envisaged to make use of that version of nCas9 which is a component of a base editor of the third generation which is referred to as “high-fidelity base editor (HF-BE3)” in Rees et al. (Rees, H. A. et al. Improving the DNA specificity and applicability of base editing through protein engineering and protein delivery. Nat. Commun. 8, 15790 (2017)). These mutations are the following four: N497A, R661A, Q695A and Q926A.

[0034] APOBEC is an abbreviation for “apolipoprotein B mRNA editing enzyme, catalytic polypeptide-like”. The term designates a family of cytidine deaminases. The APOBEC family comprises APOBEC1, APOBEC2, APOBEC3A, APOBEC3B, APOBEC3C, APOBEC3D (sometimes are also referred to as APOBEC3E), APOBEC3F, APOBEC3G, APOBEC3H, APOBEC4 and activation-induced (cytidine) deaminase.

[0035] The abbreviation CDA1 stands for “cytidine deaminase 1”.

[0036] The abbreviation “ADAR” stands for adenosine deaminase acting on RNA”. It is understood that ADAR-containing base editors are capable of editing DNA and/or RNA.

[0037] Within the APOBEC family, APOBEC3A and APOBEC1 are preferred.

[0038] Within the Tad/ADAR family, TadA and ADAR2 are preferred.

[0039] In a further preferred embodiment, said deaminase is truncated at the N- and/or C-terminus, wherein in case of APOBEC deaminases C-terminal truncation is preferred, an APOBEC3A with a C-terminal truncation of 17 amino acids (A3AΔ182) being particularly preferred, and in case of CDA1 deaminases, truncations from residue 188 or residue 198 onwards being preferred. The present inventors found out that deaminases are amenable to truncation. In other words, N- and/or C-terminal residues may be removed without a significant impact on catalytic activity.

[0040] In a further preferred embodiment, said compound comprises said peptide and wherein said peptide (i) consists of an amino acid sequence comprising 1 to 10 Pro residues and 1 to 10 small amino acid residues, said small amino acid residues preferably being selected from Ala, Gly, Cys and Ser, said amino acid sequence preferably being the sequence of SEQ ID NO: 130 (XTEN); (ii) has a length of 5, 6 or 7 amino acids; and/or (iii) consists of the sequence Aₘ(PA)ₙPₚ, wherein m and p are independently 0 or 1 and n is 1, 2, 3, 4, 5, 6 or 7, for example of SEQ ID NO: 154 or 162.

[0041] While the XTEN linker has been used in a number of proof-of-principle experiments disclosed in more detail further below, it is noted that the present inventors' contribution extends to the design of improved linkers connecting deaminase and Cas protein. Such improved linkers are the proline-rich alternating sequences of item (iii), for example the sequences of SEQ ID NOs: 154 or 162. Also these linkers have been reduced to practice. It is furthermore expected that replacing the XTEN linker with such proline-rich linker in accordance with the invention leads to further improvements.

[0042] This preferred embodiment relates to those base editing compounds of the invention which have a peptidic linker connecting components (a) and (b). As a consequence, such base editing compounds of the invention are made of a single polypeptide chain. While this is not a requirement, it is preferred. To explain further, when the agent of the invention is a single polypeptide chain, it may be delivered to the cell in the form of a nucleic acid encoding it. Such nucleic acid is also an aspect of the invention which is disclosed further below.

[0043] Small amino acid residues include Ala, Gly, Ser, Cys, Thr and Val, the first four being preferred. Preference is given to a plurality of prolines being interspersed in a sequence of small amino acids. This may give rise to a regular pattern as defined in item (iii) of this preferred embodiment, but does not have to. In other words, while particular preference is given to the sequences of SEQ ID NOs: 15 and 16, also peptidic linker consisting of sequences such as PX₂P(XP)ₖ or PXP₂(XP)ₖ and the like may be used, wherein “X” designates a small amino acid to be chosen from the above specific amino acids independently for each occurrence of X, an k is 0, 1, 2, 3, 4 or 5, preferably 1.

[0044] Said amino acid sequence of (i) may consist exclusively of the recited 1 to 10 Pro residues and 1 to 10 small amino acid residues, but does not have to. To give a specific example, the linker sequence designated “XTEN” herein, while comprising two prolines and a number of small amino acids, also comprises other amino acids, and constitutes a linker to be used in conjunction with the present invention.

[0045] In a further preferred embodiment, the truncated residues are not essential for catalytic activity of said deaminase.

[0046] The two preferred strategies in accordance with the present invention, namely truncation of the nucleobase-modifying enzyme and conferring rigidity to the linker connecting targeting moiety and modifying moiety may be used independently or in combination.

[0047] In a preferred embodiment, said base editing compound comprises or further consists of (a) an inhibitor of base excision repair, preferably an uracil DNA glycosylase inhibitor (UGI), more preferably the sequence of SEQ ID NO: 149, wherein said UGI is fused to said Cas protein or said nucleobase-modifying enzyme; and/or (b) a nuclear localization signal (NLS), preferably the sequence of SEQ ID NO: 135; wherein (a) and/or (b) are preferably connected to each other and/or to said Cas protein with a peptidic linker consisting of 1 to 10 amino acids, said linker preferably consisting of the sequence of SEQ ID NO: 132 or 148. Using the art-established nomenclature, an inhibitor of base excision repair such as UGI is a feature of base editors of the second and third generation. These base editors are accordingly (at least) tripartite fusion constructs. Base editors of the first generation (BE1) are generally bipartite fusion constructs because they do not comprise an inhibitor of base excision repair.

[0048] Preferred orders of the fusions comprising Cas protein deaminase UGI and NLS are apparent, for example, from the sequences of the most preferred base editors listed in Table 1 further below. Generally speaking, the inhibitor of base excision repair is preferably fused to the C-terminus of the Cas protein, and/or the NLS is preferably fused to the C-terminus of the inhibitor of base excision repair. In either case, short peptidic linkers, for example consisting of 1 to 10 amino acids, may be used.

[0049] The phrase “further consists of” is used to describe those embodiments which consist of the constituents recited in the broadest definition of the first aspect of the invention and the further constituents recited in the preferred embodiment at issue. In other words, the closed language “consisting of” is maintained with regard to this preferred embodiment in that said preferred embodiment presents a closed list of all constituents required and allowed to be present in the base editing compound of the invention in accordance with the particular preferred embodiment at issue.

[0050] Uracil glycosylase inhibitors are known in the art. A preferred sequence thereof is disclosed further below. In functional terms, uracil glycosylase inhibitors implement the generic notion of inhibitors of base excision repair. They serve to improve the yield or efficacy of base editing in that a higher proportion of the desired editing result is obtained on both complementary strands of the DNA to be edited.

[0051] NLS sequences are known in the art. A preferred NLS sequence is disclosed further below.

[0052] In line with the use of the term “fused” as herein, it includes both direct fusions with no intervening amino acids or linkers (“linkerless fusion”) as well as those fusions wherein between the two components to be fused, there is a peptidic linker. Preferably said peptidic linker consists of 1 to 10 amino acids, said amino acids preferably being selected from Gly and Ser. Exemplary peptidic linkers connecting UGI and NLS to base editing compounds of the invention are apparent from specific constructs of the invention is discussed further below.

[0053] There is no particular order of the components of the base editing compound of the invention, with the exception of the targeting component (preferably a Cas protein) and the editing component (preferably a nucleobase-modifying enzyme) being connected as defined by any one of items (i) to (iii) of the first aspect. In other words, UGI and independently NLS may be upstream or downstream of both the Cas protein and the nucleobase-modifying enzyme.

[0054] In a further preferred embodiment, (a) said deaminase is APOBEC3A (A3A; SEQ ID NO: 183), wherein preferably said A3A is truncated at the C-terminus; (b) said deaminase is A3AΔ182 (SEQ ID NO: 205) and is fused to the N-terminus of said Cas protein; (c) said deaminase is APOBEC1, preferably consisting of the sequence of SEQ ID NO: 129, and is fused to the N-terminus of said Cas protein, preferably of said Cas nickase; or (d) said deaminase is CDA1, preferably consisting of the sequence of SEQ ID NO: 137; and is fused to the N-terminus or the C-terminus, preferably to the N-terminus of said Cas protein, preferably of said Cas nickase, wherein preferably the C-terminus of said CDA1 is truncated, preferably either from position 198 onwards or from any of positions 188 to 194 onwards. More generally speaking, the skilled person can prepare, for a given combination of a Cas nickase and a deaminase, fusion constructs with both conceivable orientations (nickase N- or C-terminal) and identify the one providing the more desirable editing profile.

[0055] This preferred embodiment relates to preferred orientations of specific fusion constructs. It is understood that the term “fused” does not require, but allows for the presence of a linker between the two recited components. In fact, in accordance with the invention, the two components are linked by any one of items (i) to (iii) of the first aspect. It is only item (ii), directed to a direct fusion, which implements the notion of “fused” in a narrow sense, i.e. without any intervening moieties.

[0056] In a further preferred embodiment, said deaminase is CDA1 and wherein the C-terminus of said CDA1 is truncated. Also envisaged is a deaminase consisting of the sequence of SEQ ID NO: 17 or 18; see the highlighted catalytic domains in FIG. 3a.

[0057] In a further preferred embodiment, (a) said Cas protein consists of the amino acid sequence of SEQ ID NO: 1 or a sequence with at least 80% identity thereto and preferably providing nickase activity or is encoded by the nucleic acid sequence of SEQ ID NO: 2 or a sequence with at least 80% identity thereto and preferably encoding a protein with nickase activity, and is preferably selected from VQR-Cas9 (amino acid sequence of SEQ ID NO: 121 VRER-Cas9 (amino acid sequence of SEQ ID NO: 122), xCas9 (amino acid sequence of SEQ ID NO: 123), and Cas9-NG (amino acid sequence of SEQ ID NO: 124), or encoded by any one of SEQ ID NOs: 23, 24, 25 or 26; and/or (b) said deaminase consists of the amino acid sequence of any one of SEQ ID NOs: 205, 129, 137, 169, 176, 183, 198, 212, 219, 3 and 5, a sequence with at least 80% identity and providing deaminase activity or a truncated version of any such sequence, or is encoded by the nucleic acid sequence of any one of SEQ ID NOs: 107, 31, 55, 71, 78, 85, 100, 114, 220, 4 and 6, a sequence with at least 80% identity and encoding a protein with deaminase activity or a truncated version of any such sequence.

[0058] Any of the Cas proteins in accordance with item (a) of this preferred embodiment can be used to implement the Cas protein component in the base editors given in Table 1 below. Particular preference in that respect is given to the Cas nickases VQR-Cas9, VRER-Cas9, xCas9 and Cas9-NG.

[0059] The above disclosed Cas9 variants recognize different protospacer adjacent motifs (PAMs). In particular, VQR-Cas9 recognizes NGA, VRER-Cas9 recognizes NGCG, xCas9 recognizes the PAM sequences NG, GAA and GRT, and Cas9-NG recognizes the shorter PAM sequence which is NG. In all cases N designates any nucleotide. Of particular interest in that respect is the shortened PAM sequence recognized by Cas9-NG, which occurs, on an average basis, with a higher frequency than any trinucleotide sequence.

[0060] Preferred is also any level of sequence identity above said at least 80% identity, be it at the amino acid or the nucleic acid level. Accordingly, included are sequence identity levels such as at least 85% identity, at least 90%, at least 91%, at least 92%, at least 93%, at least 94%, at least 95%, at least 96%, at least 97%, at least 98% and at least 99% sequence identity.

[0061] The term “truncated version” refers to truncations in accordance with the invention, i.e., truncation of residues which are not essential for catalytic activity. A decrease of catalytic activity, while not being preferred, is acceptable, in particular in case the editing profile is sharpened at the same time. Having said that, Example 2 demonstrates that large truncations in many instances do not entail such decrease.

[0062] The amino acid sequence of SEQ ID NO: 1 defines a preferred Cas9 nickase. The amino acid sequences of SEQ ID NOs: 3 and 5 define preferred APOBEC1 and CDA1 deaminases, respectively.

[0063] In a further preferred embodiment, said compound is a single polypeptide and comprises or consists of an amino acid sequence selected from SEQ ID NOs: 204, 7, 9, 11, 13, 136, 218, 190, 144, 168, 182, 128, 152, 204 and 211.

[0064] The amino acid sequences of SEQ ID NOs: 7 and 9 comprise, from N- to C-terminus, the deaminase of SEQ ID NO: 3, a preferred peptidic linker (SEQ ID NO: 15 in case of SEQ ID NO: 7 and SEQ ID NO: 16 in case of SEQ ID NO: 9) and the Cas9 nickase of SEQ ID NO: 1. Furthermore, they comprise at their respective C-terminus an UGI (SEQ ID NO: 19) and an NLS (SEQ ID NO: 20). In either case, i.e. between the C-terminus of the nickase and the N-terminus of UGI, and furthermore between the C-terminus of UGI and the N-terminus of NLS, a short linker sequence consisting of SGGS (SEQ ID NO: 21) is present.

[0065] The sequences of SEQ ID NOs: 11 and 13 relate to particularly preferred base editing compounds of the invention which comprise, form N- to C-terminus, differently truncated versions of the CDA1 deaminase of SEQ ID NO: 5, followed by the Cas9 nickase of SEQ ID NO: 1 an UGI (SEQ ID NO: 19) and an NLS (SEQ ID NO: 20). In either case, i.e. between the C-terminus of the nickase and the N-terminus of UGI, and furthermore between the C-terminus of UGI and the N-terminus of NLS, a short linker sequence consisting of SGGS (SEQ ID NO: 21) is present.

[0066] Homologues of the specific UGI of SEQ ID NO: 19 may also be used for the present invention, wherein preferably said homologues exhibit at least 80%, at least 85%, at least 90%, at least 91%, at least 92%, at least 93%, at least 94%, at least 95%, at least 96%, at least 97%, at least 98% and at least 99% sequence identity to the sequence of SEQ ID NO: 19 and furthermore are capable of inhibiting uracil glycosylase.

[0067] Similar, homologues of the nuclear localization signal sequence of SEQ ID NO: 20 may be used, wherein preferably said homologues differ by 1, 2 or 3 amino acids from the sequence of SEQ ID NO: 20 and provide for a nuclear localization of the base editor of the invention comprising such sequence.

[0068] Particularly preferred base editors of the invention are given in the Table below.

[0069] Table 1. Recommendations for BE selection for precision cytosine base editing. The C to be edited is underlined, “no bystander” means absence of other Cs from the activity window of the BEs. N: any nucleotide (including a possible bystander C), D: not C (i.e., A, G or T), R: A or G. “Δ” indicates deletions; e.g. Δ198 means that only residues 1 to 198 are retained; Δ (194-188) means that only residues 188 to 194 are deleted. “n” means that the deaminase is fused to the N-terminus of the Cas protein; and “c” means that the deaminase is fused to the C-terminus of the Cas protein. “NL” means no linker between deaminase and Cas protein. Even though not expressly indicated, all CDA1 deletion variants do not contain a linker; see the corresponding entries of the sequence listing. PAPAPAP is a specific and preferred linker in accordance with the invention. “BE3” as used in this Table designates a class of molecules. It refers to all components of a third generation base editor with all modifications to it being separately indicated. Preferred implementations of the Cas protein are disclosed herein above.

| | | Recommended BEs: each designation refers to |
|---|---|---|
| Distance of | | a genus for exemplary or preferred |
| target | | implementations, a SEQ ID NO is given in |
| C from PAM | Bystander | brackets |
| <−19 | no | nCDA1-BE3 (SEQ ID NO: 136), nCDA1Δ198-BE3 |
| | | (SEQ ID NO: 218), A3A-NL-BE3 (SEQ ID NO: 190) |
| <−19 | no | nCDA1-BE3 (SEQ ID NO: 136), nCDA1Δ198-BE3 |
| | | (SEQ ID NO: 218), A3A-NL-BE3 (SEQ ID NO: 190) |
| | CCDDD | cCDA1-BE3 (SEQ ID NO: 144) |
| −18 | no | nCDA1Δ198-BE3 (SEQ ID NO: 218), n/cCDA1-BE3 |
| | | (SEQ ID NO: 136 or 144), A3A-NL-BE3 (SEQ ID |
| | | NO: 190) |
| | NCN | nCDA1Δ(194-188)-BE3 (SEQ ID NO: 168) |
| −17 | no | nCDA1Δ198-BE3 (SEQ ID NO: 218), cCDA1-BE3 |
| | | (SEQ ID NO: 144), A3A-BE3 (SEQ ID NO: 182), |
| | | nCDA1-BE3 (SEQ ID NO: 136) |
| | DCN | nCDA1Δ(194-188)-BE3 (SEQ ID NO: 168) |
| −16 | no | nCDA1Δ198-BE3 (SEQ ID NO: 218), A3A-BE3 |
| | | (SEQ ID NO: 182) |
| | DDDCC | cCDA1-BE3 (SEQ ID NO: 144) |
| | TCC | cCDA1-BE3 (SEQ ID NO: 144), BE-PAPAPAP |
| | | (SEQ ID NO: 152) |
| | NCD | A3AΔ182-BE3 (SEQ ID NO: 204), |
| | | A3A(Y130F)Δ186-BE3 (SEQ ID NO: 211) |
| −15 | no | nCDA1Δ198-BE3 (SEQ ID NO: 218), A3A-BE3 |
| | | (SEQ ID NO: 182) |
| | CDCD | BE-PAPAPAP (SEQ ID NO: 152), A3AΔ182-BE3 |
| | | (SEQ ID NO: 204), A3A(Y130F)Δ186-BE3 (SEQ ID |
| | | NO: 211) |
| | DCN | A3AΔ182-BE3 (SEQ ID NO: 204), |
| | | A3A(Y130F)Δ186-BE3 (SEQ ID NO: 211) |
| | RCCD | BE-PAPAPAP (SEQ ID NO: 152) |
| −14 | no | A3A-BE3 (SEQ ID NO: 182), nCDA1-BE3 (SEQ ID |
| | | NO: 136) |
| | DDCC | BE-PAPAPAP (SEQ ID NO: 152) |
| >−14 | no | A3A-BE3 (SEQ ID NO: 182), nCDA1-BE3 (SEQ ID |
| | | NO: 136) |

[0070] The term “bystander” is used to provide information about the tolerance of the base editor under consideration to the presence of further Cs within the activity window in addition to the specific C to be edited. A higher degree of tolerance in said sense means that even in the presence of further Cs in the proximity of the specific site to be edited, only or substantially only the specific site of interest (location indicated in the first column of Table 1; underlined in second column) is edited. If “no” is given in the bystander column, this means that preferably no further Cs should be in the proximity of the site to be edited if maximum precision is desired. On the other hand, if certain bystanders are given, this means that these positions are not edited or edited only to a low degree, even if they are occupied by Cs or the residues indicated in the Table.

[0071] In particularly preferred embodiments, the present invention provides the following uses:

[0072] Use of a polypeptide comprising or consisting of the sequence of any one of 204, 136, 218, 190, 144, 168, 182, 128, 152, 204 and 211 as base editor. Preferably, and this applies generally, said base editors convert a C into a T. As disclosed herein above, different Cas proteins, and different modified versions of the same Cas protein recognize different protospacer adjacent motifs (PAMs). The specific PAM sequences recognized by a given Cas protein are given further above.

[0073] Use of a polypeptide comprising or consisting of the sequence of SEQ ID NO: 136 for editing a base which is more than 19 bases upstream from the protospacer adjacent motif (PAM). Preferably, said polypeptide consists of said sequence.

[0074] Use of a polypeptide comprising or consisting of the sequence of SEQ ID NO: 218 for editing a base which is more than 19 bases upstream from the protospacer adjacent motif (PAM). Preferably, said polypeptide consists of said sequence.

[0075] Use of a polypeptide comprising or consisting of the sequence of SEQ ID NO: 190 for editing a base which is more than 19 bases upstream from the protospacer adjacent motif (PAM). Preferably, said polypeptide consists of said sequence.

[0076] Use of a polypeptide comprising or consisting of the sequence of SEQ ID NO: 136 for editing a base which is 19 bases upstream from the protospacer adjacent motif (PAM). Preferably, said polypeptide consists of said sequence.

[0077] Use of a polypeptide comprising or consisting of the sequence of SEQ ID NO: 218 for editing a base which is 19 bases upstream from the protospacer adjacent motif (PAM). Preferably, said polypeptide consists of said sequence.

[0078] Use of a polypeptide comprising or consisting of the sequence of SEQ ID NO: 190 for editing a base which is 19 bases upstream from the protospacer adjacent motif (PAM). Preferably, said polypeptide consists of said sequence.

[0079] Use of a polypeptide comprising or consisting of the sequence of SEQ ID NO: 144 for editing a base which is 19 bases upstream from the protospacer adjacent motif (PAM). Preferably, said polypeptide consists of said sequence.

[0080] Use of a polypeptide comprising or consisting of the sequence of SEQ ID NO: 218 for editing a base which is 18 bases upstream from the protospacer adjacent motif (PAM). Preferably, said polypeptide consists of said sequence.

[0081] Use of a polypeptide comprising or consisting of the sequence of SEQ ID NO: 136 or 144 for editing a base which is 18 bases upstream from the protospacer adjacent motif (PAM). Preferably, said polypeptide consists of said sequence.

[0082] Use of a polypeptide comprising or consisting of the sequence of SEQ ID NO: 190 for editing a base which is 18 bases upstream from the protospacer adjacent motif (PAM). Preferably, said polypeptide consists of said sequence.

[0083] Use of a polypeptide comprising or consisting of the sequence of SEQ ID NO: 168 for editing a base which is 18 bases upstream from the protospacer adjacent motif (PAM). Preferably, said polypeptide consists of said sequence.

[0084] Use of a polypeptide comprising or consisting of the sequence of SEQ ID NO: 218 for editing a base which is 17 bases upstream from the protospacer adjacent motif (PAM). Preferably, said polypeptide consists of said sequence.

[0085] Use of a polypeptide comprising or consisting of the sequence of SEQ ID NO: 144 for editing a base which is 17 bases upstream from the protospacer adjacent motif (PAM). Preferably, said polypeptide consists of said sequence.

[0086] Use of a polypeptide comprising or consisting of the sequence of SEQ ID NO: 182 for editing a base which is 17 bases upstream from the protospacer adjacent motif (PAM). Preferably, said polypeptide consists of said sequence.

[0087] Use of a polypeptide comprising or consisting of the sequence of SEQ ID NO: 136 for editing a base which is 17 bases upstream from the protospacer adjacent motif (PAM). Preferably, said polypeptide consists of said sequence.

[0088] Use of a polypeptide comprising or consisting of the sequence of SEQ ID NO: 128 for editing a base which is more than 17 bases upstream from the protospacer adjacent motif (PAM). Preferably, said polypeptide consists of said sequence.

[0089] Use of a polypeptide comprising or consisting of the sequence of SEQ ID NO: 168 for editing a base which is 17 bases upstream from the protospacer adjacent motif (PAM). Preferably, said polypeptide consists of said sequence.

[0090] Use of a polypeptide comprising or consisting of the sequence of SEQ ID NO: 128 for editing a base which is 16 bases upstream from the protospacer adjacent motif (PAM). Preferably, said polypeptide consists of said sequence.

[0091] Use of a polypeptide comprising or consisting of the sequence of SEQ ID NO: 128 for editing a base which is 16 bases upstream from the protospacer adjacent motif (PAM). Preferably, said polypeptide consists of said sequence.

[0092] Use of a polypeptide comprising or consisting of the sequence of SEQ ID NO: 182 for editing a base which is 16 bases upstream from the protospacer adjacent motif (PAM). Preferably, said polypeptide consists of said sequence.

[0093] Use of a polypeptide comprising or consisting of the sequence of SEQ ID NO: 144 for editing a base which is 16 bases upstream from the protospacer adjacent motif (PAM). Preferably, said polypeptide consists of said sequence.

[0094] Use of a polypeptide comprising or consisting of the sequence of SEQ ID NO: 152 for editing a base which is 16 bases upstream from the protospacer adjacent motif (PAM). Preferably, said polypeptide consists of said sequence.

[0095] Use of a polypeptide comprising or consisting of the sequence of SEQ ID NO: 204 for editing a base which is 16 bases upstream from the protospacer adjacent motif (PAM). Preferably, said polypeptide consists of said sequence.

[0096] Use of a polypeptide comprising or consisting of the sequence of SEQ ID NO: 211 for editing a base which is 16 bases upstream from the protospacer adjacent motif (PAM). Preferably, said polypeptide consists of said sequence.

[0097] Use of a polypeptide comprising or consisting of the sequence of SEQ ID NO: 128 for editing a base which is 15 bases upstream from the protospacer adjacent motif (PAM). Preferably, said polypeptide consists of said sequence.

[0098] Use of a polypeptide comprising or consisting of the sequence of SEQ ID NO: 218 for editing a base which is 15 bases upstream from the protospacer adjacent motif (PAM). Preferably, said polypeptide consists of said sequence.

[0099] Use of a polypeptide comprising or consisting of the sequence of SEQ ID NO: 182 for editing a base which is 15 bases upstream from the protospacer adjacent motif (PAM). Preferably, said polypeptide consists of said sequence.

[0100] Use of a polypeptide comprising or consisting of the sequence of SEQ ID NO: 152 for editing a base which is 15 bases upstream from the protospacer adjacent motif (PAM). Preferably, said polypeptide consists of said sequence.

[0101] Use of a polypeptide comprising or consisting of the sequence of SEQ ID NO: 204 for editing a base which is 15 bases upstream from the protospacer adjacent motif (PAM). Preferably, said polypeptide consists of said sequence.

[0102] Use of a polypeptide comprising or consisting of the sequence of SEQ ID NO: 211 for editing a base which is 15 bases upstream from the protospacer adjacent motif (PAM). Preferably, said polypeptide consists of said sequence.

[0103] Use of a polypeptide comprising or consisting of the sequence of SEQ ID NO: 211 for editing a base which is 14 bases upstream from the protospacer adjacent motif (PAM). Preferably, said polypeptide consists of said sequence.

[0104] Use of a polypeptide comprising or consisting of the sequence of SEQ ID NO: 182 for editing a base which is 14 bases upstream from the protospacer adjacent motif (PAM). Preferably, said polypeptide consists of said sequence.

[0105] Use of a polypeptide comprising or consisting of the sequence of SEQ ID NO: 136 for editing a base which is 14 bases upstream from the protospacer adjacent motif (PAM). Preferably, said polypeptide consists of said sequence.

[0106] Use of a polypeptide comprising or consisting of the sequence of SEQ ID NO: 152 for editing a base which is 14 bases upstream from the protospacer adjacent motif (PAM). Preferably, said polypeptide consists of said sequence.

[0107] Use of a polypeptide comprising or consisting of the sequence of SEQ ID NO: 182 for editing a base which is less than 14 bases upstream from the protospacer adjacent motif (PAM). Preferably, said polypeptide consists of said sequence.

[0108] Use of a polypeptide comprising or consisting of the sequence of SEQ ID NO: 136 for editing a base which is less than 14 bases upstream from the protospacer adjacent motif (PAM). Preferably, said polypeptide consists of said sequence.

[0109] Use of a polypeptide comprising or consisting of the sequence of SEQ ID NO: 128 for editing a base which is less than 14 bases upstream from the protospacer adjacent motif (PAM). Preferably, said polypeptide consists of said sequence.

[0110] As can be seen from these preferred aspects of the invention, the design approach chosen by the inventors greatly amplifies the spectrum of available base editors. This does not only apply to the PAM sequence being recognized, but also to the distance of the residue to be edited from said PAM sequence.

[0111] In a second aspect, the present invention relates to a nucleic acid encoding the compound of any one of the preceding claims, to the extent said compound is a single polypeptide.

[0112] A nucleic acid encoding a particular amino acid sequence may consist of or comprise the particular nucleic acid sequence encoding the amino acid sequence. Nucleic acids in accordance with the second aspect embrace either genus, i.e., flanking nucleotide sequences may be present but do not have to be.

[0113] Preferred flanking sequences include, for example, a promoter at the 5′-end and/or a terminator, preferably with a polyadenylation signal, at the 3′ end. Suitable promoters and terminators are at the skilled person's disposal.

[0114] It is understood that any preferred embodiment of the base editing compound in accordance with the first aspect of the invention gives rise to preferred embodiments of the nucleic acid of the second aspect, to the extent applicable.

[0115] Similarly, and even if certain claims might be limited to certain back-references, it is understood that any preferred embodiments of the base editing compound in accordance with the invention may be combined such that such combined subject-matter is also embraced by the present invention. Furthermore, any such subject-matter is also a preferred implementation of any of the further aspects of the invention disclosed further below.

[0116] In a third aspect, the present invention provides a method of base editing, said method comprising introducing into a cell a nucleic acid in accordance with the second aspect or a compound in accordance with the first aspect.

[0117] In a preferred embodiment, said method further comprises introducing into said cell a guide nucleic acid for said Cas protein, preferably said Cas nickase or said dead Cas.

[0118] It is a known property of Cas proteins that their capability to target a particular region on a target nucleic acid, said target nucleic acid preferably being DNA or RNA, is conferred by a guide nucleic acid, preferably guide RNA. Accordingly, in accordance with this preferred embodiment, such guide nucleic acid is to be introduced into the cell to which a compound or a nucleic acid of the second aspect is to be introduced. Introducing of the base editing compound or nucleic acid in accordance with the third aspect on the one hand and of the guide nucleic acid on the other hand may be performed concomitantly or in any order.

[0119] The base editors of the present invention are widely applicable in both prokaryotic and eukaryotic organisms and cells. For the purpose of introducing said base editor or nucleic acids encoding it into said organisms or cells, any of the art-established methods of transducing, transforming or transfecting can be used. Suitable methods can be chosen by the skilled person without further ado.

[0120] In accordance with established knowledge about the CRISPR/Cas system, it is furthermore understood that such guide nucleic acids are chosen in a manner which target the compound of the invention to a site in the target nucleic acid which furthermore comprises a protospacer adjacent motif (PAM) which is recognized by the particular Cas-variant to be used, preferred Cas-variants being Cas9 and Cas12. Preferred PAMs include those known in the art such as 5′-NGG-3′ in case of Cas9, wherein N can be any nucleobase. Cas12 usually recognizes a PAM motif which is rich in T (e.g., 5′-TTN-3′, N being any nucleobase). Further PAM sequences and Cas proteins recognizing them are disclosed herein further above.

[0121] In a further preferred embodiment, said method is performed in vitro or ex vivo.

[0122] Also preferred are applications of said method in the fields of plant breeding and agricultural biotechnology. In such a context, base editing may serve to modify the genotype of plants such that useful traits are generated or enhanced, useful traits including resistances, stress tolerance, yield and food quality.

[0123] In a fourth aspect, the present invention provides a pharmaceutical composition comprising or consisting of (a) the compound in accordance with the second aspect; and/or (b) the nucleic acid in accordance with the first aspect.

[0124] In a preferred embodiment, said pharmaceutical composition further comprises or further consists of a guide nucleic acid for said Cas protein, wherein said guide nucleic acid comprises a sequence which is homologous to a subsequence of a target gene, wherein said target gene is associated with a genetic disorder.

[0125] Preferred genetic disorders are those which arise from a point mutation or SNP. To explain further, in such a setting, the beneficial properties of the present invention, namely the precise editing profile is highly desirable and advantageous.

[0126] Pharmaceutical compositions in accordance with the present invention may comprise further active agents. It is preferred, though, that the recited agents, namely compound of the invention, nucleic acid of the second aspect and the optional guide nucleic acid are the only pharmaceutically active agents.

[0127] As is well-established in the art, pharmaceutical compositions may comprise excipients, fillers and/or diluents. Examples of suitable pharmaceutical carriers, excipients and/or diluents are well known in the art and include phosphate buffered saline solutions, water, emulsions, such as oil/water emulsions, various types of wetting agents, sterile solutions etc. Compositions comprising such carriers can be formulated by well known conventional methods. These pharmaceutical compositions can be administered to the subject at a suitable dose. Administration of the suitable compositions may be effected by different ways, e.g., by intravenous, intraperitoneal, subcutaneous, intramuscular, topical, intradermal, intranasal or intrabronchial administration.

[0128] The dosage regimen will be determined by the attending physician and clinical factors. As is well known in the medical arts, dosages for any one patient depends upon many factors, including the patient's size, body surface area, age, the particular compound to be administered, sex, time and route of administration, general health, and other drugs being administered concurrently. Proteinaceous pharmaceutically active matter may be present in amounts between 1 ng and 10 mg/kg body weight per dose; however, doses below or above this exemplary range are envisioned, especially considering the aforementioned factors. If the regimen is a continuous infusion, it should also be in the range of 1 μg to 10 mg units per kilogram of body weight per minute.

[0129] In a fifth aspect, the present invention provides a compound in accordance with the first aspect or a nucleic acid in accordance with the second aspect, and a guide nucleic acid for said nickase for use in a method of treating, alleviating or preventing a disorder, wherein said guide nucleic acid comprises a sequence which is homologous to a subsequence of a target gene, wherein said disorder is associated with a point mutation or an SNP in said target gene.

[0130] In a sixth aspect, the present invention provides a kit comprising or consisting of (a)(i) one or more compounds in accordance with the second aspect; and/or (ii) one or more nucleic acids in accordance with the first aspect.

[0131] In a preferred embodiment, said kit furthermore comprises or further consists of (b) one or more guide nucleic acids for the nickase comprised in said compound, wherein each of said guide nucleic acids comprises a sequence which is identical to a subsequence of a given target gene; and/or (c) a manual comprising instructions for performing the method of the third aspect.

[0132] In a further preferred embodiment, said kit comprises a plurality of said compounds and/or a plurality of said nucleic acids, wherein at least two of said compounds of (a)(i) or at least two of the compounds encoded by said nucleic acids of (a)(ii) differ with regard to their base editing profile. Preferably, the difference with regard to their base editing profile is the distance of the edited position from the PAM motif.

[0133] As can be seen from the evidence comprised in Example 2, the two different strategies in accordance with the present invention, i.e. deaminase truncation and use of a rigid and/or short linker, provide in either case for very localized editing profiles on the target nucleic acid, wherein the specific location which is edited is located upstream from the PAM motif to different extents depending on the strategy chosen and/or the specific implementation for a given strategy.

[0134] To explain further, the particularly preferred base editor in accordance with the present invention which has the amino acid sequence of SEQ ID NO: 9 (also designated BE-PAPAPAP herein) mainly edits within an activity window from −14 to −16. This window size generally does not amount to a deficiency. For example, this base editor may be used in combination with a guide sequence which targets the compound of the invention to a region within the target nucleic acid which has exactly one cytidine within said activity window.

[0135] Base editors with CDA1 truncations such as the particularly preferred base editors having the amino acid sequences of SEQ ID NOs: 11 and 13 mainly edit at position −18.

[0136] As explained above, the present invention furthermore envisages the use of distinct Cas-derived targeting components or Cas proteins, in particular Cas nickases, e.g., derived from Cas9 or Cas12. These in turn have different preferences with regard to the PAM motifs.

[0137] Before such background, kits in accordance with the invention are provided which offer a plurality of base editors which differ from each other with regard to the distance of the edited position from a PAM motif. As such, provided is a versatile toolkit which allows highly targeted intervention at a plurality of sites upstream of a given PAM motif.

[0138] In a seventh aspect, the present invention provides the use of a peptide as defined in any one of the preceding claims or of a non-peptidic linker as defined in relation to the first aspect for covalently connecting a Cas protein such as a Cas nickase (nCas) or a dead Cas (dCas) and a deaminase (DA) to provide a base editing compound.

[0139] In a preferred embodiment, said deaminase is truncated at the N- or C-terminus.

[0140] Again, such truncations are truncations in the sense of the present disclosure, i.e. truncations which do not significantly affect enzymatic activity of said deaminase.

[0141] As regards the embodiments characterized in this specification, in particular in the claims, it is intended that each embodiment mentioned in a dependent claim is combined with each embodiment of each claim (independent or dependent) said dependent claim depends from. For example, in case of an independent claim 1 reciting 3 alternatives A, B and C, a dependent claim 2 reciting 3 alternatives D, E and F and a claim 3 depending from claims 1 and 2 and reciting 3 alternatives G, H and I, it is to be understood that the specification unambiguously discloses embodiments corresponding to combinations A, D, G; A, D, H; A, D, I; A, E, G; A, E, H; A, E, I; A, F, G; A, F, H; A, F, I; B, D, G; B, D, H; B, D, I; B, E, G; B, E, H; B, E, I; B, F, G; B, F, H; B, F, I; C, D, G; C, D, H; C, D, I; C, E, G; C, E, H; C, E, I; C, F, G; C, F, H; C, F, I, unless specifically mentioned otherwise.

[0142] Similarly, and also in those cases where independent and/or dependent claims do not recite alternatives, it is understood that if dependent claims refer back to a plurality of preceding claims, any combination of subject-matter covered thereby is considered to be explicitly disclosed. For example, in case of an independent claim 1, a dependent claim 2 referring back to claim 1, and a dependent claim 3 referring back to both claims 2 and 1, it follows that the combination of the subject-matter of claims 3 and 1 is clearly and unambiguously disclosed as is the combination of the subject-matter of claims 3, 2 and 1. In case a further dependent claim 4 is present which refers to any one of claims 1 to 3, it follows that the combination of the subject-matter of claims 4 and 1, of claims 4, 2 and 1, of claims 4, 3 and 1, as well as of claims 4, 3, 2 and 1 is clearly and unambiguously disclosed.

[0143] The figures show:

[0144] FIG. 1. Rigid linkers narrow the width of the editing window of BE3. a Protospacers and PAM (blue; C-terminal 3 nt) sequences of the genomic loci tested, with the target Cs shown in red (with subscripts indicating the respective position). Subscript numbers indicate the positions of the cytidines relative to the PAM. C-to-T editing at any of the indicated Cs inactivates the Can1 transporter and thus causes resistance to canavanine (Nishida, K. et al. Targeted nucleotide editing using hybrid prokaryotic and vertebrate adaptive immune systems. Science 353, 1248 (2016)). b Editing efficiency and specificity of the base editors tested as determined by canavanine selection. The x-axis represents the target Cs within the protospacers. The y-axis shows their C-to-T editing frequency (see Example 1). Values and error bars represent the mean and standard deviation of three independent biological replicates.

[0145] FIG. 2. Comparison of N- and C-terminal deaminase fusions to nCas9. a Structure of nBE3 (=BE3; (Komor, A. C., Kim, Y. B., Packer, M. S., Zuris, J. A. & Liu, D. R. Programmable editing of a target base in genomic DNA without doublestranded DNA cleavage. Nature 533, 420-424 (2016))), cBE3, nCDA1-BE3, and cCDA1-BE3 driven by the GalL inducible promoter. In all constructs, the XTEN linker separates the nucleoside deaminase domain from the nCas9 domain. nSpCas9: Streptococcus pyogenes Cas9 nickase. b Base editors with the deaminase at the N-terminus show broadened base editing windows. The sequence of the target (C)₉ motif is shown with the numbers representing the position of possible editing targets (grey, in the middle of the sequences) relative to the PAM (grey, at the end of the sequences). % of C-to-T editing represents the percentage of total sequencing reads with the target C converted to T. c Base editing outcome of nBE3, cBE3, nCDA1-BE3, and cCDA1-BE3 targeting several sites containing target Cs at different positions (indicated on the x-axis) in the Can1 gene. Values and error bars represent the mean and standard deviation of three independent biological replicates. Order in the legend (top to bottom) corresponds to the order of the bars in the figure (left to right).

[0146] FIG. 3. Design of base editors with truncated CDA1 domains. a Amino acid sequence alignment of CDA1 and human AID. The catalytic domain HxE-PCxxC and the nuclear export signal (NES) are indicated by black horizontal lines. The alignment was created by CLUSTALW (Larkin, M. A. et al. Clustal W and Clustal X version 2.0. Bioinformatics 23, 2947-2948 (2007); https://www.genome.jp/tools-bin/clustalw) and graphically formatted with the help of the ESPript 3.0 server (Robert, X. & Gouet, P. Deciphering key features in protein structures with the new ENDscript server. Nucleic Acids Res. 42, W320-W324 (2014).) (http://espript.ibcp.fr/ESPript/ESPript/). Identical amino acid residues are shaded in red (dark grey), similar residues in yellow (light grey). b Schematic representation of base editors with C-terminal CDA1 truncations (named after the last CDA1 residue included).

[0147] FIG. 4. Effects of C-terminal truncations of the CDA1 domain on the width of the editing window of nCDA1-BE3 base editors. All base editor variants were tested on both (C)₈ (a) and (C)₉ (b) motifs (see Methods). Cs within each target region are shown in red (grey, in the middle of the sequences), with the number below indicating their distance from the PAM (blue; grey, at the end of the sequences). The C-to-T conversion efficiencies are plotted for all Cs within the protospacer, and shown in comparison to the nCDA1-BE3 base editor with the full-length CDA1 (light grey bars). Values and error bars represent the mean and standard deviation of three biological replicates.

[0148] FIG. 5. Base editors with C-terminally truncated CDA1 domains edit position C₋₁₈ with high precision. nCDA1-BE3, cCDA1-BE3, and selected base editors with C-terminally truncated CDA1 domains are compared. a Editing of genomic loci containing multiple cytidines directly adjacent or in close proximity to C₋₁₈. Cytidines representing possible editing targets are shown in red (grey where reproduced in greyscale; with subscripts indicating the respective position) with the subscript number representing their position relative to the PAM (CGG). b, c Base editors with truncated CDA1 domains greatly improve editing product distribution and produce predominantly singly C₋₁₈-modified products. % of edited reads represents the percentage of total sequencing reads containing the products shown. Values and error bars represent the mean and standard deviation of three biological replicates.

[0149] FIG. 6. Analysis of base editing patterns and efficiencies in single yeast colonies selected for canavanine resistance. A comparison of base editing frequencies for nCDA1-BE3, cCDA1-BE3, and selected base editors with truncated CDA1 domains is shown. Yeast cells were transformed with plasmids expressing the base editor and an sgRNA targeting the Can1-5 site. The target sequence is shown with the cytidines that can potentially undergo editing in red (grey, in the middle of the sequences) and the PAM in blue (grey, at the end of the sequences). If C-to-T conversion occurs at position −18 or −19 or both, the Can1 gene will be inactivated and the cell becomes resistant to canavanine. Values and error bars reflect the mean and standard deviation of three biological replicates. See also Table 1.

[0150] FIG. 7. High-precision base editing at target sites containing non-NGG PAMs. a Structure of nCDA1-BE3 in comparison to base editors harboring CDA1 truncations (ΔCDA1). nSpCas9: Streptococcus pyogenes Cas9 nickase; XTEN: synthetic linker sequence (13); UGI: uracil DNA glycosylase inhibitor; NLS: nuclear localization signal. b Cas9 variants with altered PAM specificities. c-g BE variants with CDA1 truncations mediate high-precision base editing at target sites comprised of multiple cytidines (polyC targets). The x-axis shows the Cs in the target sequence with their position relative to the PAM indicated. The y-axis (C-to-T editing in %) represents the percentage of total sequencing reads with the target C converted to T. Values and error bars represent the mean and standard deviation of three independent biological replicates. c Analysis of base editing precision of VQR-Cas9 BEs fused to selected C-terminally truncated versions of CDA1. For comparison, the BE carrying the full-length CDA1 and the nCDA1-BE3 editor are also included. d Analysis of base editing precision of VRER-Cas9 BEs fused to C-terminally truncated CDA1 versions. e Analysis of base editing precision of xCas9 BEs fused to C-terminally truncated CDA1 versions. f,g Analysis of base editing precision of SpCas9-NG BEs fused to C-terminally truncated CDA1 versions.

[0151] FIG. 8. Base editors with C-terminally truncated A3A sequences exhibit narrowed editing windows. a Structure of A3A-BE3 and BEs with A3A truncations (A3AΔ-BE3 variants). b, c Effects of C-terminal truncations of the A3A domain on the width of the editing window of A3AΔ-BE3s. All base editor variants were tested on both the polyC-7 (b) and polyC-8 (c) sites (see Methods). Cs within each target region are indicated in (grey, in the middle of the sequences), with the number below indicating their distance from the PAM (grey, at the end of the sequences). The C-to-T conversion efficiencies are plotted for all Cs within the protospacer, and shown in comparison to the A3A-BE3 base editor with the full-length A3A (light grey bars). Values and error bars represent the mean and standard deviation of three biological replicates.

[0152] FIG. 9. Base editing outcomes of A3A-BE3, truncated A3AΔ-BE3 variants and the recently optimized editor eA3A-BE3 (20) when targeting specific sites in the yeast Can1 gene. a Sequences of the five target sites (containing Cs at different positions). Target Cs are indicated in grey (in the middle of the sequences) and numbered relative to the PAM (grey, at the end of the sequences). Edited clones were identified by using the canavanine selection strategy (see Methods). b Base editing efficiency and precision. The x-axis represents the target Cs within the protospacers (with the order of the bars from left to right corresponding to the Cs in the legend from top to bottom). The y-axis shows their C-to-T mutation frequency (see Methods). Values and error bars represent the mean and standard deviation of three independent biological replicates.

[0153] FIG. 10. Analysis of off-target editing. Genetic changes that occurred in strains harboring nCDA1-BE3, cCDA1-BE3, nCDA1Δ190-BE3 or a control plasmid without a BE construct were identified by whole genome sequencing. a-b Comparison of the total number of detected indels (a) and SNVs (b). c The mutation frequency of different types of SNVs in cells treated by the three base editors and the control. The order of the bars from left to right corresponds to the BEs listed in the legend from top to bottom. The sgRNA was designed to target site Can1-4. Values and error bars represent the mean and standard deviation of three independent biological replicates.

[0154] The examples illustrate the invention.

### Example 1

### Methods

[0155] Yeast Strains and Growth Conditions.

[0156] Saccharomyces cerevisiae BY4743 (diploid, MAT a/α, his3Δ1/his3Δ1, leu2Δ0/leu2Δ0, LYS2/lys2Δ0, met15Δ0/MET15, ura3Δ0/ura3Δ) was used as host strain for genome editing. Cells were grown non-selectively in YPAD medium (2% Bacto peptone, 1% Bacto yeast extract, 2% glucose, 0.003% adenine hemisulfate). For culture in Petri dishes, the medium was solidified with 2% agar. Selection of yeast transformants based on the URA3 and LEU2 markers was done on a synthetic complete (SC) medium (6.7 g/L of Difco Yeast Nitrogen Base, 20 g/L glucose) and a mixture of appropriate amino acids deficient in uracil and leucine (SC-U-L). Yeast strains were cultivated at 28° C. on a rotary shaker.

[0157] DNA Methods.

[0158] PCR was performed with Phusion High-Fidelity DNA Polymerase (ThermoFisher) according to the manufacturer's instructions. Cloning and amplification of plasmids were carried out in the E. coli strain DH5α. Plasmids harboring the Streptococcus pyogenes cas9 gene (p415-GaIL-Cas9-CYC1t) and a chimeric guide RNA construct (p426-SNR52p-gRNA.CAN1.Y-SUP4t) were provided by the laboratory of Dr. George Church and obtained from Addgene (Cambridge, Mass., USA).

[0159] To generate APOBECI base editors, the APOBECI reading frame and the partial cas9 sequence were PCR-amplified using oligonucleotides with overlapping linker sequences. The two fragments were cloned into the Spel/Sbfl-digested p415-GaIL-Cas9-CYC1t with the help of the In-Fusion HD Cloning Kit (Clontech, CA, USA). The D10A point mutation was introduced into cas9 with primers harboring the desired mutation by amplification of the entire plasmid template followed by DpnI digestion to remove the parental template. The UGI gene was codon-optimized for yeast and synthesized (Eurofins Genomics, Ebersberg, Germany), followed by insertion into the AscI/MluI-digested vector p415-GaIL-Cas9-CYC1t. To generate CDA1 base editors, the reading frame encoding pmCDA1 was PCR-amplified to replace the APOBECI fragment within BE3, thus generating nCDA1-BE3. To produce a fusion of CDA1 to the C-terminus of Cas9, plasmid pRS315e_pGal-nCas9 (D10A)-PmCDA1 (provided by the laboratory of Akihiko Kondo, Hyogo, Japan, and obtained from Addgene) was modified. First, the amplified UGI sequence was introduced into the XbaI site, and the resulting vector was then digested with Ascl and Sphl. Subsequently, two PCR fragments (overlapping by the XTEN linker sequence) were inserted to generate cCDA1-BE3. Insertion of three PCR fragments (covering XTEN and APOBEC1) produced base editor cBE3. The CDA1 protein truncations were generated by PCR amplification, and cloned into SpeI/Sbf1-digested BE3 or AscI/SphI-digested cBE3 vectors to produce the ΔCDA1-Cas and Cas-ΔCDA1 vector series, respectively. To produce YEE-BE3, the mutated APOBECI from plasmid pCMV-dCpf1-BE-YEE (provided by the laboratory of Jia Chen, Shanghai, China, and obtained from Addgene) was PCR amplified and cloned into SpeI/Sbf1-digested BE3.

[0160] To generate CDA1-BE3 variants with VQR-Cas9, the three required point mutations (D1135V/R1335Q/T1337R) were introduced into the cas9 gene by PCR with primers harboring the desired mutations, and the resulting three PCR products were cloned into the NruI/NcoI-digested BE3 to obtain VQR-BE3 with the help of the In-Fusion HD Cloning Kit (Clontech, Mountain View, Calif., USA). The mutated fragment was then released by digesting VQR-BE3 with NruI and MluI, followed by ligation into the similarly digested CDA1 BE plasmid (21). To construct VRER-BE3 variants, three fragments containing the four mutations (D1135V/G1218R/R1335E/T1337R) were PCR-amplified followed by cloning into the NruI/MluI-digested VQR-BE3. The mutated fragment was then excised by digesting VRER-BE3 with NruI and MluI, and ligated into the CDA1 BE construct cut with the same enzyme combination. For the generation of SpCas9-NG BE3 variants, four fragments containing the seven mutations (R1335V/L1111R/D1135V/G1218R/E1219F/A1322R/T1337R) were PCR-amplified followed by cloning into the Nrul/Mlul-digested vector VQR-BE3. The mutated fragment was released by digesting SpCas9-NG-BE3 with NruI and MluI and cloned into the similarly cut CDA1 BE plasmid. For the construction of xCas9 variants, plasmid xCas9 (3.7)-BE3 (obtained from Addgene) was digested with the restriction enzymes Sbf1 and AscI. The resulting 3.7 kb fragment was then inserted into the CDA1 BE construct digested with Sbf1 and AscI. To obtain cCDA1-BE3 variants, the mutated fragments were PCR-amplified using the corresponding BE3 variant as template and cloned into the NurI/SphI-digested cCDA1-BE3 plasmid (21).

[0161] To generate hA3A, hA3B, hA3G, hAID, mAID, cAICDA and truncated hA3A base editors, the deaminase genes were PCR-amplified from plasmid clones (provided by the laboratory of Dr. Jia Chen, Shanghai, China, and obtained from Addgene) together with part of the cas9 sequence, and then ligated into the SpeI/SbfI-digested BE3 vector. To produce A3A(R128A)-BE3, A3A(Y130F)-BE3 as well as eA3A-BE3, the point mutations (R128A, Y130F and N57G) were introduced into A3A with primers containing the appropriate mutations.

[0162] To generate plasmids expressing sgRNAs that target-specific sites, the protospacer sequences were introduced by PCR amplification, and the resulting PCR products were cloned into the Clal/Kpnl-digested vector p426-SNR52p-gRNA.CAN1.Y-SUP4t with the In-Fusion HD Cloning Kit (Clontech, CA, USA).

[0163] Yeast Transformation and Genomic DNA Extraction.

[0164] Yeast cells were transformed with the LiAc/SS carrier DNA/PEG method using 0.5-1 μg plasmid DNA (Gietz, R. D. & Schiestl, R. H. Quick and easy yeast transformation using the LiAc/SS carrier DNA/PEG method. Nat. Protoc. 2, 35-37 (2007)). Transgenic clones were selected on SC-U-L media and confirmed by PCR analyses. Yeast genomic DNA was extracted according to a published protocol (Lõoke, M., Kristjuhan, K. & Kristjuhan, A. Extraction of genomic DNA from yeasts for PCR-based applications. Biotechniques 50, 325-328 (2011)). PCR products were purified (PCR Purification kit; Macherey-Nagel) and then sequenced.

[0165] CAN1 Mutagenesis.

[0166] Yeast colonies were picked, suspended in 3 mL SC medium with 2% glucose and without leucine and uracil, and grown to a stationary phase. The cells were then pelleted, washed twice in sterile water, and then resuspended in SC induction medium with 2% galactose and 1% raffinose, but without leucine and uracil, to an OD600 of 0.3. The cells were incubated for 20 h prior to plating on YPAD rich or SC media plates without arginine but with 60 mg/mL L-canavanine (Sigma). After incubation for 3 days, the colony number on each plate was counted. The C-to-T mutation frequency in CAN1 was determined as the ratio of the colony count on canavanine-containing plates to the colony count on YPAD-rich media plates. Each experiment was performed at least three times on different days. To determine the mutation spectrum, colonies were randomly picked and suspended in sterile water, followed by PCR amplification of the relevant CAN1 fragment and DNA sequencing. Control cultures (not treated with base editors) did not produce canavanine-resistant colonies.

[0167] Next-Generation Sequencing.

[0168] Yeast colonies harboring plasmids expressing base editors and sgRNAs were picked from SC-L-U plates, suspended in 3 mL SCL-U medium with 2% glucose, and grown to a stationary phase. The cultures were then washed twice to remove residual glucose, resuspended in 5 mL SC-L-U medium with 2% galactose and 1% raffinose to an OD600 of 0.3, and incubated for 20 h at 28° C. on a rotary shaker. Genomic DNA was extracted from culture samples of 0.5 mL volume, and the regions targeted by base editing were amplified by PCR with primer pairs containing index tags for sample multiplexing. PCR amplification was performed with the Phusion High-Fidelity DNA Polymerase (ThermoFisher) according to the manufacturer's protocol, followed by product purification with the NucleoSpin Gel and PCR Clean-up kit (Machery-Nagel). The purified index-labeled PCR products were pooled at equal molar ratios. PCR-free library construction and NGS sequencing, demultiplexing by assigning reads to samples, and data filtering (including removal of adaptor sequences, contaminations and low-quality reads from raw reads) were done commercially (BGI, Hong Kong). Sequencing was performed on an Illumina MiSeq 4000 platform in a paired-end way to obtain 150 bp read length for each side and, on average, more than 100,000 reads per sample.

[0169] Data Analysis.

[0170] The clean FASTQ files obtained after data filtering were further analyzed with python scripts (available at https://github.com/zfcarpe/Cas9Sequencing). Briefly, the “pattern_extract.py” was first applied to scan all sequencing reads and extract the reads with the fixed length of the editing region (and exactly matching the two flanking sequences). This procedure excluded indel-containing and imperfectly matching reads, and allows summarizing each base calling in an alignment-like manner. Subsequent application of the “result_stat.py” script scanned each base within the editing region and calculated the frequency of each base converted to one of the other three bases by dividing the respective read number by the total number of sequencing reads to obtain the percentage of C-to-T editing and the percentage of edited reads with the C converted to any of the other bases. In addition, the script calculates the frequencies of all edited products by scanning each aligned read for conversion of the potential target cytidines. For the analysis of indel frequencies, the sequencing reads were scanned for two exactly matching 10-bp sequences that flank both sides of the region of interest (i.e., the sequence containing the editing sites). Reads without exact matches were excluded from further analysis. By calculating the length of the region, all sequencing reads exactly matching the length of the reference sequence were classified as not containing an indel, otherwise the read was classified as harboring an indel. A shell script “Cas9Sequencing.sh” combined the processes.

### Example 2

### Results

[0171] Rigid Linkers Improve Precision of APOBEC1-Based Editors.

[0172] We hypothesized that the positioning on the target sequence of the Cas9 protein relative to the deaminase domain (i.e., their physical distance) and the rigidity of the connection between these two domains of the base editor determine the width of the editing window, and hence the precision of the base editor. In previous studies, a 16 amino acid (aa) flexible linker (XTEN) has been identified as the best compromise between editing efficiency and specificity (Komor, A. C., Kim, Y. B., Packer, M. S., Zuris, J. A. & Liu, D. R. Programmable editing of a target base in genomic DNA without doublestranded DNA cleavage. Nature 533, 420-424 (2016)). Using L-canavanine selection in yeast (Nishida, K. et al. Targeted nucleotide editing using hybrid prokaryotic and vertebrate adaptive immune systems. Science 353, 1248 (2016)), we first investigated the effects of length and rigidity of the linker between APOBEC1 and nCas9 (Cas9 nickase) on base editing precision and efficiency when targeting several sites in the Can1 gene (FIG. 1) that contain Cs within the activity window of the base editor BE3 (Komor, A. C., Kim, Y. B., Packer, M. S., Zuris, J. A. & Liu, D. R. Programmable editing of a target base in genomic DNA without doublestranded DNA cleavage. Nature 533, 420-424 (2016)). L-Canavanine is a highly toxic analog of the proteinogenic amino acid arginine, and mutations inactivating the uptake protein Can1 confer resistance to canavanine. We used an inducible base editor construct, determined the optimal induction time, and then tested 10 different rigid linker sequences (containing the amino acid proline that, due to its secondary amine, confers conformational rigidity) in comparison to the commonly used XTEN flexible linker. Consistent with previous reports (Komor, A. C., Kim, Y. B., Packer, M. S., Zuris, J. A. & Liu, D. R. Programmable editing of a target base in genomic DNA without doublestranded DNA cleavage. Nature 533, 420-424 (2016)), the base editor BE3 (containing the XTEN linker) allowed editing at all Cs within a window of nine nucleotides (FIG. 1). Omission of the linker sequence or use of a very short rigid linker (i.e., the 3 aa linker PAP) abolished editing nearly completely. Interestingly, rigid linkers of 5-7 aa made editing substantially more precise, with the seven aa linker PAPAPAP largely restricting editing to positions −15 and −16 (FIG. 1). Longer linkers resulted in reduced editing accuracy, suggesting that a seven aa rigid linker is optimal.

[0173] It was reported that mutations in the APOBECI domain of BE3 can also narrow the base editing width. We, therefore, compared the base editing outcome of BE3, YEE-BE3 (the optimal BE3 variant (Kim, Y. B. et al. Increasing the genome-targeting scope and precision of base editing with engineered Cas9-cytidine deaminase fusions. Nat. Biotechnol. 35, 371-376 (2017)), and BE-PAPAPAP when targeting the Can1 sites. We found that YEE-BE3, although mainly editing C₋₁₅ or C₋₁₆, suffered from strongly reduced editing activity at these sites. Although it will be important to confirm this deficit for additional sequence contexts, this finding is consistent with a recent study that also reported low editing efficiency of the YEE-BE3 base editor (Gehrke, J. M. et al. An APOBEC3A-Cas9 base editor with minimized bystander and off-target activities. Nat. Biotechnol. 36, 977-982 (2018)).

[0174] Previous work has mostly investigated the activity of base editors in favorable sequence contexts, with relatively few C targets within the protospacer sequence. To develop a more rigorous (and Can1-independent) assay for base editor specificity, we also investigated the worst-case scenario, in which all nucleotides within the BE3 activity window are Cs (i.e., a nonacytidine motif from −13 to −21). Analysis of editing products by deep sequencing revealed that base editors with 5-7 aa rigid linkers mainly edited at positions C₋₁₄ to C₋₁₆.

[0175] These editors showed greatly improved site selectivity and a narrowed editing window, while retaining up to 90% of the editing efficiency of the original BE3.

[0176] Importantly, when editing product distribution was analyzed, BE3-treated sequences mostly contained four simultaneously edited bases, whereas short rigid linker-containing base editors predominantly generate products with one to three edited bases, thus providing further evidence for short rigid linkers leading to more precise editing.

[0177] Engineering of Improved CDA1-Based Editors.

[0178] To test whether other base editors can also be improved by engineering the linker region connecting the nucleoside deaminase domain with the nCas9 domain, we next applied a similar strategy to CDA1, the AID homolog of sea lamprey (Nishida, K. et al. Targeted nucleotide editing using hybrid prokaryotic and vertebrate adaptive immune systems. Science 353, 1248 (2016)) that has been reported to exhibit superior performance to APOBEC1 in certain sequence contexts (Komor, A. C. et al. Improved base excision repair inhibition and bacteriophage Mu Gam protein yields C:G-to-T:A base editors with higher efficiency and product purity. Sci. Adv. 3, eaao4774 (2017)).

[0179] When fused to nCas9 with flexible linkers up to 100 aa long (Nishida, K. et al. Targeted nucleotide editing using hybrid prokaryotic and vertebrate adaptive immune systems. Science 353, 1248 (2016)), CDA1 conducts C-to-T conversion in a window of approximately −16 to −19. To better understand what influences the width of the activity window, we generated four constructs for direct comparison of N- and C-terminal fusions of APOBEC1 and CDA1 to nCas9, initially using the XTEN linker (FIG. 2a). When the APOBECI domain was fused to the C-terminus of nCas9 (cBE3), the editing activity was very low (FIG. 2b, c), consistent with previous observations (Komor, A. C., Kim, Y. B., Packer, M. S., Zuris, J. A. & Liu, D. R. Programmable editing of a target base in genomic DNA without doublestranded DNA cleavage. Nature 533, 420-424 (2016)). By contrast, when CDA1 was fused to either the N-terminus or the C-terminus of nCas9, both fusions exhibited high editing efficiency. However, there was a remarkable difference in the width of the editing window, in that the N-terminal CDA1 (nCDA1-BE3) triggered editing in a much broader window when tested on either an oligo(C) substrate or target sites in the Can1 gene (FIG. 2b, c). The C-terminal fusion showed a more specific editing activity, peaking from C₋₁₆ to C₋₁₉, consistent with previous reports (Nishida, K. et al. Targeted nucleotide editing using hybrid prokaryotic and vertebrate adaptive immune systems. Science 353, 1248 (2016)).

[0180] Comparative assessment of the specificity of previously generated base editors and our base editors on several genomic target sequences showed that, in many cases, some level of discrimination between adjacent Cs is possible, but the achievable precision depends on the sequence context and on the base editor used. In general, the nCDA1-BE3 and cCDA1-BE3 editors display less dependence on the neighboring nucleotides and can edit target Cs efficiently even when located immediately after an A, a context that is only very inefficiently edited by APOBEC1-based editors. Moreover, CDA1-based editors enhance product purity, as reported previously (Komor, A. C. et al. Improved base excision repair inhibition and bacteriophage Mu Gam protein yields C:G-to-T:A base editors with higher efficiency and product purity. Sci. Adv. 3, eaao4774 (2017)).

[0181] In an attempt to further narrow the activity window of CDA1 editors, we removed the linker between CDA1 and Cas9, generating versions nCDA1-NL-BE3 and cCDA1-NL-BE3. Surprisingly, both linkerless fusions showed an unaltered activity window with largely unchanged editing efficiency at each C within it. This result suggests that the termini of CDA1 are inherently flexible and may act as linker-like sequences. We, therefore, tested the impact of N- and C-terminal truncations (removing potential linker-like fragments) on base editing.

[0182] A nuclear export signal (NES) was reported to reside in the C-terminus of the CDA1 homolog AID (Patenaude, A. M. et al. Active nuclear import and cytoplasmic retention of activation-induced deaminase. Nat. Struct. Mol. Biol. 16, 517-527 (2009)), and its location corresponds to residues 199 to 208 in CDA1 (FIG. 3a). Deletion of the NES from AID increased the deamination efficiency of the enzyme (Yang, L. et al. Engineering and optimising deaminase fusions for genome editing. Nat. Commun. 7, 1038 (2016); Ma, Y. et al. Targeted AID-mediated mutagenesis (TAM) enables efficient genomic diversification in mammalian cells. Nat. Methods 13, 1029-1035 (2016); Hess, G. T. et al. Directed evolution using dCas9-targeted somatic hypermutation in mammalian cells. Nat. Methods 13, 1036-1042 (2016)). We generated a series of 22 base editors with C-terminally truncated CDA1 versions fused to nCas9 (FIG. 3b) and tested them on two oligo(C) motifs (FIG. 4). While removal of the NES had only small effects on editing efficiency and specificity (nCDA1Δ198-BE3), larger deletions made editing more precise and substantially narrowed the activity window of the base editors (FIG. 4). The enzyme tolerated truncations up to amino acid residue 158 without a significant loss in editing efficiency (FIG. 4). The major gain in site selectivity was seen with the removal of at least 13-14 amino acids from the Cterminus of CDA1 (nCDA1Δ195-BE3, nCDA1Δ194-BE3; FIG. 4). Larger deletions had similar beneficial effects on editing precision, although some of them displayed slightly reduced overall editing efficiency (FIG. 4). Unlike the full-length base editor, the best-performing truncated variants showed a clear preference for one or two Cs within the oligo(C) stretch (e.g., nCDA1Δ194-BE3 for C₋₁₈ and, to a lesser extent, C₋₁₇ within the (C)₉ motif: FIG. 4a; nCDA1Δ192-BE3 and nCDA1Δ190-BE3 for C₋₁₈ in the (C)₈ motif: FIG. 4b). By contrast, truncations at the N-terminus of CDA1 in cCDA1-BE3 had no significant effect on the width of the editing window.

[0183] Tests on oligo(C) motifs represent the most stringent assays for site selectivity of base editors. However, such long C stretches would only rarely be targets of genome editing with base editors in vivo. To assess whether base editors with C-terminally truncated CDA1 domains also show superior performance in more natural (heteropolymeric) genomic sequence contexts, we targeted four sites in the Can1 gene, each of which contains at least one additional C directly adjacent or close to position C₋₁₈. When the base editing outcome of nCDA1-BE3, cCDA1-BE3 and our base editors with truncated CDA1 domains were compared, our base editors displayed editing with much higher precision (FIG. 5). For all four tested sites, our base editors mainly edited position C₋₁₈, with a 2- to 20-fold higher efficiency than other adjacent Cs (FIG. 5a). Importantly, the base editors also produced predominantly single-C-modified products at position C₋₁₈ (accounting for 50-94% of all edited products), whereas nCDA1-BE3 and cCDA1-BE3 produced mainly double or triple modified products (FIG. 5b, c). We also investigated the indel frequency and base editing purity at these sites when treated by narrowed-window base editors. We found that the frequency of editing errors was very low, consistent with what has been reported for other base editors.

[0184] Finally, we also determined the base editing outcome in individual colonies obtained by the canavanine selection method. While nCDA1-BE3 and cCDA1-BE3 yielded only 1 and 6 colonies (out of total 24 randomly picked colonies), respectively, that carried the specifically C₋₁₈ edited Can1 gene biallelically (i.e., in a homozygous fashion), the base editors with truncated CDA1 domains yielded 18-24 colonies that were homozygous for the allele only edited at position C₋₁₈. Importantly, two of the base editors produced 100% precisely edited homozygous clones (FIG. 6; Table 1).

TABLE 1
Base editors with CDA1 truncations exhibit many more homozygous C₋₁₉T₋₁₈
colonies than nCDA1-BE3 and cCDA1-BE3*. For each base editor, 24 canavanine-resistant
colonies were randomly picked from the selection plate followed by sequencing of the Can1
locus. The major types of edited products are listed in the first column of the table, and the
colony numbers representing each product type are given. For nCDA1-BE3, the genotype of
the remaining colony is C₋₁₉T₋₁₈/T₋₁₉C₋₁₈; for nCDA1Δ194-BE3, the remaining two colonies are
C₋₁₉T₋₁₈/T₋₁₉C₋₁₈ and T₋₁₉T₋₁₈/T₋₁₉C₋₁₈, respectively.

| | nCDA1- | cCDA1- | nCDA1Δ194- | nCDA1Δ193- | nCDA1Δ192- | nCDA1Δ190- | nCDA1Δ184- | nCDA1Δ176- |
|---|---|---|---|---|---|---|---|---|
| | BE3 | BE3 | BE3 | BE3 | BE3 | BE3 | BE3 | BE3 |
| C₋₁₉T₋₁₈ | 1/24 | 6/24 | 18/24 | 21/24 | 22/24 | 24/24 | 24/24 | 20/24 |
| Homozygous | | | | | | | | |
| C₋₁₉T₋₁₈/T₋₁₉T₋₁₈ | 0/24 | 11/24 | 2/24 | 2/24 | 1/24 | 0/24 | 0/24 | 2/24 |
| Heterozygous | | | | | | | | |
| T₋₁₉C₋₁₈ | 22/24 | 7/24 | 2/24 | 1/24 | 1/24 | 0/24 | 0/24 | 2/24 |
| Homozygous | | | | | | | | |

[0185] Expanding Precision Base Editing to Non-NGG PAM Sequences

[0186] Recently, several Cas9 variants have been described that recognize non-NGG PAM sequences (Nishimasu, H. et al. Engineered CRISPR-Cas9 nuclease with expanded targeting space. Science 361, 1259-1262 (2018); Hu, J. H. et al. EvolvedCas9 variants with broad PAM compatibility and high DNA specificity. Nature 556, 57-63 (2018); Kleinstiver, B. P. et al. Engineered CRISPR-Cas9 nucleases with altered PAM specificities. Nature 523, 481-485 (2015)). To test whether Cas9 variants with expanded PAM compatibility can be used in our high-precision BEs to extend their DNA targeting scope, we replaced the nCas9 sequence with that of four different nCas9 variants recognizing four different non-NGG PAMs (FIG. 7a, b). Of particular interest is the minimal PAM sequence NG (as recognized by variant SpCas9-NG; FIG. 7b), which occurs much more frequently in DNA sequences than the wild-type PAM sequence NGG. As deaminase domain, we tested the full-length CDA1 and a series of truncated CDA1 versions that lack 13 to 20 C-terminal amino acids. When fused to nCas9, this range of C-terminal deletions was shown previously to provide the maximum increase in editing precision while retaining high editing activity (21). In this way, 32 new BEs were constructed: the full-length CDA1 (as N-terminal or C-terminal fusion) and 6 CDA1 deletions combined with the VQR-Cas9 variant (nCDA1Δ195-VQRBE3; nCDA1Δ194-VQRBE3; nCDA1Δ193-VQRBE3; nCDA1Δ192-VQRBE3; nCDA1Δ190-VQRBE3; nCDA1Δ188-VQRBE3; FIG. 7a, c) that recognizes the PAM sequence NGA (FIG. 7b), the full-length CDA1 (as N-terminal or C-terminal fusion) and 6 CDA1 deletions combined with the VRER-Cas9 variant (nCDA1Δ195-VRERBE3; nCDA1Δ194-VRERBE3; nCDA1Δ193-VRERBE3; nCDA1Δ192-VRERBE3; nCDA1Δ190-VRERBE3; nCDA1Δ188-VRERBE3; FIG. 7d) that recognizes the PAM sequence NGCG (FIG. 7b), the full-length CDA1 (as N-terminal or C-terminal fusion) and 6 CDA1 deletions combined with the xCas9 variant (nCDA1Δ195-xBE3; nCDA1Δ194-xBE3; nCDA1Δ193-xBE3; nCDA1Δ192-xBE3; nCDA1Δ190-xBE3; nCDA1Δ188-xBE3; FIG. 7e) that recognizes the PAM sequences NG, GAA and GAT (FIG. 7b), and the full-length CDA1 (as N-terminal or C-terminal fusion) and 6 CDA1 deletions combined with the SpCas9-NG variant (nCDA1Δ195-NGBE3; nCDA1Δ194-NGBE3; nCDA1Δ193-NGBE3; nCDA1Δ192-NGBE3; nCDA1Δ190-NGBE3; nCDA1Δ188-NGBE3; FIG. 7f,g) that recognizes the PAM sequence NG (FIG. 7b).

[0187] For each set of BEs, we tested target sites that contain a stretch of consecutive cytidines within the activity window upstream of the PAM. PolyC motifs were used to provide the most rigorous test for editing precision, in that specific editing of a single C would require maximum discriminatory power. Editing efficiency and precision were first assessed by dideoxy chain termination sequencing of amplified PCR products, and the two best-performing BEs were then further characterized by high-throughput next-generation sequencing (FIG. 7; see Methods; Tan, J., et al. Engineering of high-precision base editors for site-specific single nucleotide replacement. Nat. Commun. 10, 439 (2019)).

[0188] The VQR-Cas9 variant recognizes the PAM sequence NGA (FIG. 7b). The activity window ranged from C₋₁₄ to C₋₁₉ in target sequence PolyC-1-NGA and from C₋₁₄ to C₋₂₀ in target sequence PolyC-2-NGA. By contrast, VQR-Cas9 BEs harboring CDA1 truncations had a much narrower activity window and predominantly edited positions C₋₁₇ and C₋₁₈ in target sequence PolyC-1-NGA and C₋₁₇ and C₋₁₈ in sequence PolyC-2-NGA (FIG. 7c). Interestingly, the largest truncation, nCDA1Δ188-VQRBE3, even discriminated to some extent between the two positions in that C₋₁₈ was edited nearly twice as efficiently as C₋₁₇ in sequence PolyC-1-NGA (FIG. 7c).

[0189] The VRER-Cas9 variant recognizes the PAM sequence NGCG (FIG. 7b). The truncated variants efficiently edited both target sequences and displayed greatly superior editing precision on sequence PolyC-4-NGCG (FIG. 7d).

[0190] Recently, two Cas9 variants, designated xCas9 and SpCas9-NG, were developed that show greatly relaxed PAM recognition specificity and, instead of NGG, recognize the minimal PAM sequence NG (Nishimasu, H. et al. Engineered CRISPR-Cas9 nuclease with expanded targeting space. Science 361, 1259-1262 (2018); Hu, J. H. et al. EvolvedCas9 variants with broad PAM compatibility and high DNA specificity. Nature 556, 57-63 (2018)). When tested on three non-NGG target sites (PolyC-1-NGA, PolyC-5-NGC and PolyC-6-NGT), xCas9-derived BEs displayed detectable activity only on one of the three sites (PolyC-5-NGC; FIG. 7e. A particularly well-performing truncated variant, nCDA1Δ194-xBE3, edited position C₋₁₈ with high selectivity and strongly enhanced efficiency (of more than 35%; FIG. 7e).

[0191] BEs constructed with SpCas9-NG edited all three non-NGG target sites (FIG. 7f,g). Compared to the full-length BE (nCDA1-NGBE3), the truncated versions again exhibited superior editing preference. The truncated versions predominantly edited one or two nucleotides (FIG. 7f,g). Typically, position C₁₈ was most efficiently recognized, but dependent on the target site, some BEs also edited C₋₁₇ (e.g., nCDA1Δ194-NGBE3 in PolyC-1-NGA) or C₋₁₉ (e.g., nCDA1Δ194-NGBE3 in PolyC-6-NGT; FIG. 7g) at high efficiency. For comparison, we also tested the reciprocal fusions harboring the SpCas9 variants at the N-terminus (cCDA1-VQRBE3, cCDA1-VRERBE3, cCDA1-xBE3 and cCDA1-NGBE3). These fusions showed a narrower activity window than the C-terminal fusions, but did not reach the specificity of the best-performing fusions with truncated CDA1 versions. When target sites upstream of the wild-type PAM of Cas9, NGG, were tested, the SpCas9-NG-derived BEs displayed reduced editing activity compared to wild-type Cas9-derived BEs. This finding is consistent with recent studies that reported lower genome editing activity of SpCas9-NG on canonical NGG PAMs (Nishimasu, H. et al. Engineered CRISPR-Cas9 nuclease with expanded targeting space. Science 361, 1259-1262 (2018), Zhong, Z. et al. Improving plant genome editing with high-fidelity xCas9 and non-canonical PAM-targeting Cas9-NG. Mol. Plant 12, 1027-1036 (2019)).

[0192] Taken together, our findings indicate that BEs with truncated CDA1 sequences tolerate replacement of Cas9 with variants that recognize alternative PAMs, including PAMs with greatly relaxed specificity such as NG. The high efficiency and accuracy of these new editors greatly expand the editing scope of high-precision BEs.

[0193] Engineering of A3A-Based Precision BEs

[0194] In an attempt to develop additional high-precision BEs that selectively edit nucleotide positions other than C₋₁₈, we generated fusions of several deaminases to nCas9 by omitting a linker sequence between the two proteins. This approach was taken to investigate the possibility that these deaminases inherently harbor a linker-like fragment at their C-terminus.

[0195] Six different deaminases were tested by fusing nCas9 directly to their C-terminus. The fusion proteins were then assayed for their base editing efficiency on two polyC-containing target sites. The BE based on the human cytidine deaminase APOBEC3A (A3A; (Gehrke, J. M. et al. An APOBEC3A-Cas9 base editor with minimized bystander and off-target activities. Nat. Biotechnol. 36, 977-982 (2018)), referred to as hA3A-NL-BE3, displayed the best performance in that it conferred the highest editing efficiency on both target sequences. We, therefore chose A3A for further optimization.

[0196] For comparison, we also generated an A3A-BE3 editor with the standard XTEN linker (Rees, H. A. et al. Improving the DNA specificity and applicability of base editing through protein engineering and protein delivery. Nat. Commun. 8, 15790 (2017)). Surprisingly, we observed that hA3A-NL-BE3 (for brevity subsequently referred to as A3A-NL-BE3) showed a slightly broader editing window than A3A-BE3 and also caused a shift in the most strongly edited (central) positions, despite the shorter connection between the cytidine deaminase domain (A3A) and the nCas9 domain of the fusion protein. This may be attributable to linker removal slightly altering the spatial structure of the fusion protein (and, in this way, affecting positioning of the deaminase domain on the target sequence), and would be consistent with the variable effects of linker engineering seen in previous studies (Kim, Y. B., et al. Increasing the genome-targeting scope and precision of base editing with engineered Cas9-cytidine deaminase fusions. Nat. Biotechnol. 36, 371-376 (2017); Tan, J., et al. Engineering of high-precision base editors for site-specific single nucleotide replacement. Nat. Commun. 10, 439 (2019)). The editing efficiency of both BEs was similar at both tested sites (Supplementary FIG. 10), possibly suggesting that the C-terminus of A3A is extraordinarily flexible.

[0197] A3A-based BEs were reported to exhibit a lower dependence on the sequence context, reduced sensitivity to DNA methylation and a wider editing window (Zong, Y. et al. Efficient C-to-T base editing in plants using a fusion of nCas9 and human APOBEC3A. Nat. Biotechnol. 36, 950-953 (2018); Wang, X., et al. Efficient base editing in methylated regions with a human APOBEC3A-Cas9 fusion. Nat. Biotechnol. 36, 946-949 (2018); Gehrke, J. M. et al. An APOBEC3A-Cas9 base editor with minimized bystander and off-target activities. Nat. Biotechnol. 36, 977-982 (2018)). To test if the precision of these BEs can be improved by narrowing the activity window, we constructed a series of truncations at the C-terminus of A3A and determined their impact on base editing (FIG. 8a). Previously, we showed that the major gain in site selectivity for CDA1-based BEs was seen with the removal of at least 13 amino acids from the C-terminus (nCDA1Δ195-BE3; Tan, J., et al. Engineering of high-precision base editors for site-specific single nucleotide replacement. Nat. Commun. 10, 439 (2019)). Alignment of A3A with CDA1 revealed that the 13 amino acid CDA1 truncation corresponds to residue 194 of A3A. We generated six BEs with C-terminally truncated A3A versions fused to nCas9 and tested them on two polycytidine motifs (FIG. 8b). Deletion of 17 amino acids (A3AΔ182-BE3) made the editing significantly more specific in that A3AΔ182-BE3 preferentially edits position C₋₁₅ or C₋₁₆ (FIG. 8b). When tested on target sequence polyC-8, the truncated editors A3AΔ190-BE3, A3AΔ186-BE3 and A3AΔ182-BE3 displayed improved specificity. For example, A3AΔ182-BE3 exhibits a strong preference for positions C₋₁₅ and C₋₁₆, while showing greatly reduced editing activity at the neighboring positions C₋₁₇ and C₋₁₄ (FIG. 8c).

[0198] To confirm the superior precision of the truncated editors A3AΔ190-BE3, A3AΔ186-BE3 and A3AΔ182-BE3, we compared the base editing outcomes when targeting different cytidines within the yeast Can1 gene (Tan, J., et al. Engineering of high-precision base editors for site-specific single nucleotide replacement. Nat. Commun. 10, 439 (2019)). Each of the five tested sites contains one or two target Cs in different distances from the PAM, ranging from position C₋₁₉ to position C₋₁₁ (FIG. 9a). Canavanine-resistant colonies clones can arise only when C-to-T base editing occurs and results in synthesis of an inactive gene product (Tan, J., et al. Engineering of high-precision base editors for site-specific single nucleotide replacement. Nat. Commun. 10, 439 (2019)). While the BE with the full-length A3A (A3A-BE3) non-selectively edited all Cs within a window of nine nucleotides (FIG. 9b), the BEs containing truncated A3A versions mainly edited positions C₋₁₅ or C₋₁₆, confirming the results obtained with polycytidine target sequences (FIG. 8b).

[0199] It was recently reported that mutations in A3A (N57G mutation in an A3A variant dubbed eA3A) can reduce bystander editing frequency by enhancing the preference of the editor for TCR motif (with R being A or G; Gehrke, J. M. et al. An APOBEC3A-Cas9 base editor with minimized bystander and off-target activities. Nat. Biotechnol. 36, 977-982 (2018)). We, therefore, generated an eA3A-BE3 editor and compared it with our best-performing truncated A3A BEs. We found that eA3A, although mainly editing C₋₁₅ or C₋₁₆, suffered from reduced editing activity (FIG. 9b), suggesting relatively poor editing at non-TCR sites.

[0200] It has been reported that A3A-derived BEs can induce significant transcriptome-wide off-target editing at the RNA level. Specific amino acid substitutions (R128A or Y130F) in A3A largely eliminate these off-target activities (Zhou, C., et al. Off-target RNA mutation induced by DNA base editing and its elimination by mutagenesis. Nature 571, 275-278 (2019); Grünewald, J., et al. Transcriptome-wide off-target RNA editing induced by CRISPR-guided DNA base editors. Nature 569, 433-437 (2019)). We therefore investigated the effect of each of these two mutations on the width of the base editing window and the BE activity when combined with proper A3A truncations. Introduction of either of the two mutations into A3A-BE3 neither reduced the base editing efficiency, consistent with previous findings (Zhou, C., et al. Off-target RNA mutation induced by DNA base editing and its elimination by mutagenesis. Nature 571, 275-278 (2019)), nor did it affect the base editing window. When we combined these mutations with the two optimal A3A truncations (A3AΔ186 and A3AΔ182), we found that Y130F, but not R128A, in combination with the A3A version truncated at residue 186 (i.e., BE variant A3A(Y130F)Δ186-BE3) displays a base editing window and an editing efficiency similar to A3AΔ186-BE3, and thus should be used to suppress off-target RNA editing.

[0201] Together, these data demonstrate that the A3A deaminase can be engineered to obtain high-precision base editors that predominantly edit position C₋₁₅ or C₋₁₆, while retaining high editing efficiency.

[0202] Analysis of Genome-Wide Off-Target Editing by Whole Genome Sequencing

[0203] Recently, cytosine base editors were reported to produce substantial genome-wide off-target effects that are largely independent of the sgRNA (Jin, S., et al. Cytosine, but not adenine, base editors induce genome-wide off-target mutations in rice. Science 364, 292-295 (2019); Zuo, E., et al. Cytosine base editor generates substantial off-target single-nucleotide variants in mouse embryos. Science 364, 289-292 (2019)). Since a narrower editing window means fewer target nucleotides, we envisioned that our narrow-window base editors could also reduce the off-target DNA editing. We, therefore, investigated off-target editing in yeast cells treated with nCDA1-BE3, cCDA1-BE3, nCDA1Δ190-BE3 and a no BE control, in combination with an sgRNA targeting a Can1 site. Canavanine selection was used to isolate colonies harboring on-target editing events. The truncated CDA1 version Δ190 was chosen for this experiment, because we had previously shown that this version displays high editing precision as well as high editing efficiency for most tested sites (Tan, J., et al. Engineering of high-precision base editors for site-specific single nucleotide replacement. Nat. Commun. 10, 439 (2019)). For all constructs, cultures grown from three different transformed colonies were mixed, followed by genomic DNA isolation and whole-genome sequencing. The three BE variants showed comparable numbers of indels as the no BE control (FIG. 10a). When the total number of SNVs (single nucleotide variants) was analyzed, the full-length fusions were found to display many more SNVs than the control, in agreement with the previous reports on off-target effects of cytosine BEs (Jin, S., et al. Cytosine, but note adenine, base editors induce genome-wide off-target mutations in rice. Science 364, 292-295 (2019); Zuo, E., et al. Cytosine base editor generates substantial off-target single-nucleotide variants in mouse embryos. Science 364, 289-292 (2019)). However, the truncated version exhibited a substantially reduced number of SNVs that was only slightly higher than that of the negative control (FIG. 10b). We also analyzed the mutation types and found that, in nCDA1-BE3 and cCDA1-BE3, the frequency of C-to-T (G-to-A) transitions was significantly higher than in the control and the truncated base editor nCDA1Δ190-BE3 (FIG. 10c). These findings indicate that high editing precision of BEs can contribute to reduced non-specific editing at off-target sites.

[0204] Guidelines for the Choice of the Optimal Cytidine BE

[0205] Three different cytidine deaminases (APOBEC1, CDA1 and APOBEC3A) have been engineered to produce efficient cytosine BEs, modify PAM specificities, and alter position and width of the editing window. BE variants with different properties have been obtained that differ in their suitability for (i) different target sequences and (ii) different positions of the C to be edited within the protospacer.

[0206] There is now sufficient information available to define some guidelines for the choice of the best BE depending on the position of the C, the sequence context and the presence or absence of bystander Cs (see Table 1 which is presented further above).

[0207] If the target C is located at position C₋₁₉ relative to the PAM and no bystander C is present, three BEs can be recommended: nCDA1-BE3, nCDA1Δ198-BE3 and A3A-NL-BE3. If the target C is in the same position (C₋₁₉), but has a bystander C directly upstream (CCDDD motif, with D being any nucleotide but C), cCDA1-BE3 would be the best choice (Tan, J., et al. Engineering of high-precision base editors for site-specific single nucleotide replacement. Nat. Commun. 10, 439 (2019)).

[0208] If the target C is located at C₋₁₈ and has a bystander C in its vicinity (NCN motif, with N being any nucleotide, including a possible bystander C), BEs with C-terminal truncations of CDA1 (Δ194 to Δ188) are recommended (FIG. 7; Tan, J., et al. Engineering of high-precision base editors for site-specific single nucleotide replacement. Nat. Commun. 10, 439 (2019)), and it may be advisable to test two or three different truncations.

[0209] For editing at C₋₁₆ with a 5′ bystander C (NCD context) or editing at C₋₁₅ with a 3′ bystander C (DCN), A3AΔ182-BE3 and A3A(Y130F)Δ186-BE3 are the editors of choice (FIGS. 2 and 4; Table 1).

[0210] With our set of narrow-window BEs, many disease-causing T-to-C and A-to-G mutations can now potentially be corrected in a precise manner. For example, a T-to-C mutation at position 497 of the coding region of the human gene encoding presenilin-1 (PSEN1-L166P mutation) is associated with early-onset Alzheimer's disease (Moehlmann, T., et al. Presenilin-1 mutations of leucine 166 equally affect the generation of the Notch and APP intracellular domains independent of their effect on Abeta 42 production. Proc. Natl. Acad. Sci. USA 99, 8025-8030 (2002)). This mutation can be corrected by a BE that has this C within its predicted editing window at position −18 relative to the PAM sequence NG. Precision is important here, because an additional C is present immediately adjacent to the target C (at position 496), which also lies within the editing window (−19 relative to the PAM). Using precision BEs with CDA1 truncations, this C now can be targeted much more accurately (Table 1). Similarly, an A-to-G mutation at position 980 of the coding region of the tyrosinase-encoding gene (representing a T-to-C mutation in the complementary strand) causes oculocutaneous albinism (TYR-Y327C mutation; 8). The target C is in a TCAC motif and located in position −15 of the PAM sequence AGG. Therefore, this mutation can be precisely corrected with the BEs A3AΔ182-BE3 or A3A(Y130F)Δ186-BE3 (Table 1).

1. A base editing compound comprising or consisting of
(a) a Cas protein, and, covalently connected therewith;
(b) a nucleobase-modifying enzyme,
wherein the covalent connection of (a) and (b) is
(i) direct;
(ii) provided by a peptide comprising at least one Pro residue, said peptide having a length between 1 and 20, preferably between 1 and 15 amino acids; or
(iii) provided by a non-peptidic linker, said non-peptidic linker being a small organic molecule comprising one or more double bonds, one or more triple bonds, and/or one or more aromatic rings.

2. The compound of claim 1, wherein
(a) said Cas protein is a Cas nickase or dead Cas, said Cas nickase preferably being Cas9 or Cas12, and said dead Cas preferably being dead Cas9 or dead Cas12; and/or
(b) said nucleobase-modifying enzyme is selected from a deaminase, a nucleoside synthase, a DNA methyl transferase and a DNA demethylase, said deaminase preferably being selected from the APOBEC, CDA1 or Tad/ADAR families, APOBEC3A being particularly preferred.

3. The compound of claim 1 or 2, wherein said deaminase is truncated at the N- and/or C-terminus, wherein in case of APOBEC deaminases C-terminal truncation is preferred, an APOBEC3A with a C-terminal truncation of 17 amino acids (A3AΔ182) being particularly preferred, and in case of CDA1 deaminases, truncations from residue 188 or residue 198 onwards being preferred.

4. The compound of claim 3, wherein the truncated residues are not essential for catalytic activity of said deaminase.

5. The compound of any one of claims 1 to 4, wherein said compound comprises said peptide and wherein said peptide
(i) consists of an amino acid sequence comprising 1 to 10 Pro residues and 1 to 10 small amino acid residues, said small amino acid residues preferably being selected from Ala, Gly and Ser, said amino acid sequence preferably being the sequence of SEQ ID NO: 130 (XTEN);
(ii) has a length of 5, 6 or 7 amino acids; and/or
(iii) consists of the sequence Aₘ(PA)ₙPₚ, wherein m and p are independently 0 or 1 and n is 1, 2, 3, 4, 5, 6 or 7, for example of SEQ ID NO: 154 or 162.

6. The compound of any of the preceding claims, said compound comprising or further consisting of one or both of
(a) an inhibitor of base excision repair, preferably an uracil DNA glycosylase inhibitor (UGI), more preferably the sequence of SEQ ID NO: 149; and
(b) a nuclear localization signal (NLS), preferably the sequence of SEQ ID NO: 135;
wherein (a) and/or (b) are preferably connected to each other and/or to said Cas protein with a peptidic linker consisting of 1 to 10 amino acids, said linker preferably consisting of the sequence of SEQ ID NO. 132 or 148.

7. The compound of any one of the preceding claims, wherein
(a) said deaminase is APOBEC3A (A3A; SEQ ID NO: 183), wherein preferably said A3A is truncated at the C-terminus;
(b) said deaminase is A3AΔ182 (SEQ ID NO: 205) and is fused to the N-terminus of said Cas protein;
(c) said deaminase is APOBEC1, preferably consisting of the sequence of SEQ ID NO: 129, and is fused to the N-terminus of said Cas protein; or
(d) said deaminase is CDA1, preferably consisting of the sequence of SEQ ID NO: 137; and is fused to the N-terminus or the C-terminus, preferably to the N-terminus of said Cas protein, wherein preferably the C-terminus of said CDA1 is truncated, preferably either from position 198 onwards or from any of positions 188 to 194 onwards.

8. The compound of any one of the preceding claims, wherein
(a) said Cas protein consists of the amino acid sequence of SEQ ID NO: 1 or a sequence with at least 80% identity thereto and preferably providing nickase activity, or is encoded by the nucleic acid sequence of SEQ ID NO: 2 or a sequence with at least 80% thereto identity and preferably encoding a protein with nickase activity, and is preferably selected from VQR-Cas9 (amino acid sequence of SEQ ID NO: 121), VRER-Cas9 (amino acid sequence of SEQ ID NO: 122), xCas9 (amino acid sequence of SEQ ID NO: 123), and Cas9-NG (amino acid sequence of SEQ ID NO: 124) or encoded by any one of SEQ ID NOs: 23, 24, 25 or 26; and/or
(b) said deaminase consists of the amino acid sequence of any one of SEQ ID NOs: 205, 129, 137, 169, 176, 183, 198, 212, 219, 3 and 5, a sequence with at least 80% identity and providing deaminase activity or a truncated version of any such sequence, or is encoded by the nucleic acid sequence of any one of SEQ ID NOs: 107, 31, 55, 71, 78, 85, 100, 114, 220, 4 and 6, a sequence with at least 80% identity and encoding a protein with deaminase activity or a truncated version of any such sequence.

9. The compound of any one of the preceding claims, wherein said compound is a single polypeptide and comprises or consists of an amino acid sequence selected from SEQ ID NOs: 204, 7, 9, 11, 13, 136, 218, 190, 144, 168, 182, 128, 152, 204 and 211.

10. A nucleic acid encoding the compound of any one of the preceding claims, to the extent said compound is a single polypeptide.

11. A method of base editing, said method comprising introducing into a cell a nucleic acid of claim 10 or a compound of any one of claims 1 to 9.

12. The method of claim 11, further comprising introducing into said cell a guide nucleic acid for said nickase.

13. The method of claim 11 or 12, wherein said method is performed in vitro or ex vivo.

14. A pharmaceutical composition comprising or consisting of
(a) the compound of any one of claims 1 to 9; and/or
(b) the nucleic acid of claim 10.

15. The pharmaceutical composition of claim 14, further comprising or further consisting of a guide nucleic acid for said nickase, wherein said guide nucleic acid comprises a sequence which is homologous to a subsequence of a target gene, wherein said target gene is associated with a genetic disorder.

16. A compound of any one of claims 1 to 9 or a nucleic acid of claim 10, and a guide nucleic acid for said nickase for use in a method of treating, alleviating or preventing a disorder, wherein said guide nucleic acid comprises a sequence which is homologous to a subsequence of a target gene, wherein said disorder is associated with a point mutation or an SNP in said target gene.

17. A kit comprising or consisting of
(a) (i) one or more compounds of any one of claims 1 to 9; and/or
(ii) one or more nucleic acids of claim 10.

18. The kit of claim 17, furthermore comprising or further consisting of
(b) one or more guide nucleic acids for the nickase comprised in said compound, wherein each of said guide nucleic acids comprises a sequence which is identical to a subsequence of a given target gene; and/or
(c) a manual comprising instructions for performing the method of any one of claims 11 to 13.

19. The kit of claim 17 or 18, wherein said kit comprises a plurality of said compounds and/or a plurality of said nucleic acids, wherein at least two of said compounds of (a)(i) or at least two of the compounds encoded by said nucleic acids of (a)(ii) differ with regard to their base editing profile.

20. Use of a peptide as defined in any one of the preceding claims or of a non-peptidic linker as defined in claims 1 and 9 for covalently connecting a Cas protein such as a Cas nickase (nCas) or a dead Cas (dCas) and a deaminase (DA) to provide a base editing compound.

21. The use of claim 20, wherein said deaminase is truncated at the N- or C-terminus.

The application's sequence listing, which the Patent Office published only in electronic form, follows.

SEQUENCE LISTING (220 sequences)

SEQ ID NO: 1 - protein, 1368 aa, Artificial Sequence
  Cas9 nickase
MDKKYSIGLAIGTNSVGWAVITDEYKVPSKKFKVLGNTDRHSIKKNLIGALLFDSGETAEATRLKRTARRRYTRRKNRICYLQEIFSNEMAKVDDSFFHRLEESFLVEEDKKHERHPIFGNIVDEVAYHEKYPTIYHLRKKLVDSTDKADLRLIYLALAHMIKFRGHFLIEGDLNPDNSDVDKLFIQLVQTYNQLFEENPINASGVDAKAILSARLSKSRRLENLIAQLPGEKKNGLFGNLIALSLGLTPNFKSNFDLAEDAKLQLSKDTYDDDLDNLLAQIGDQYADLFLAAKNLSDAILLSDILRVNTEITKAPLSASMIKRYDEHHQDLTLLKALVRQQLPEKYKEIFFDQSKNGYAGYIDGGASQEEFYKFIKPILEKMDGTEELLVKLNREDLLRKQRTFDNGSIPHQIHLGELHAILRRQEDFYPFLKDNREKIEKILTFRIPYYVGPLARGNSRFAWMTRKSEETITPWNFEEVVDKGASAQSFIERMTNFDKNLPNEKVLPKHSLLYEYFTVYNELTKVKYVTEGMRKPAFLSGEQKKAIVDLLFKTNRKVTVKQLKEDYFKKIECFDSVEISGVEDRFNASLGTYHDLLKIIKDKDFLDNEENEDILEDIVLTLTLFEDREMIEERLKTYAHLFDDKVMKQLKRRRYTGWGRLSRKLINGIRDKQSGKTILDFLKSDGFANRNFMQLIHDDSLTFKEDIQKAQVSGQGDSLHEHIANLAGSPAIKKGILQTVKVVDELVKVMGRHKPENIVIEMARENQTTQKGQKNSRERMKRIEEGIKELGSQILKEHPVENTQLQNEKLYLYYLQNGRDMYVDQELDINRLSDYDVDHIVPQSFLKDDSIDNKVLTRSDKNRGKSDNVPSEEVVKKMKNYWRQLLNAKLITQRKFDNLTKAERGGLSELDKAGFIKRQLVETRQITKHVAQILDSRMNTKYDENDKLIREVKVITLKSKLVSDFRKDFQFYKVREINNYHHAHDAYLNAVVGTALIKKYPKLESEFVYGDYKVYDVRKMIAKSEQEIGKATAKYFFYSNIMNFFKTEITLANGEIRKRPLIETNGETGEIVWDKGRDFATVRKVLSMPQVNIVKKTEVQTGGFSKESILPKRNSDKLIARKKDWDPKKYGGFDSPTVAYSVLVVAKVEKGKSKKLKSVKELLGITIMERSSFEKNPIDFLEAKGYKEVKKDLIIKLPKYSLFELENGRKRMLASAGELQKGNELALPSKYVNFLYLASHYEKLKGSPEDNEQKQLFVEQHKHYLDEIIEQISEFSKRVILADANLDKVLSAYNKHRDKPIREQAENIIHLFTLTNLGAPAAFKYFDTTIDRKRYTSTKEVLDATLIHQSITGLYETRIDLSQLGGD

SEQ ID NO: 2 - DNA, 4107 bp, Artificial Sequence
  Cas9 nickase
atggacaagaagtactccattgggctcgctatcggcacaaacagcgtcggttgggccgtcattacggacgagtacaaggtgccgagcaaaaaattcaaagttctgggcaataccgatcgccacagcataaagaagaacctcattggcgccctcctgttcgactccggggagacggccgaagccacgcggctcaaaagaacagcacggcgcagatatacccgcagaaagaatcggatctgctacctgcaggagatctttagtaatgagatggctaaggtggatgactctttcttccataggctggaggagtcctttttggtggaggaggataaaaagcacgagcgccacccaatctttggcaatatcgtggacgaggtggcgtaccatgaaaagtacccaaccatatatcatctgaggaagaagcttgtagacagtactgataaggctgacttgcggttgatctatctcgcgctggcgcatatgatcaaatttcggggacacttcctcatcgagggggacctgaacccagacaacagcgatgtcgacaaactctttatccaactggttcagacttacaatcagcttttcgaagagaacccgatcaacgcatccggagttgacgccaaagcaatcctgagcgctaggctgtccaaatcccggcggctcgaaaacctcatcgcacagctccctggggagaagaagaacggcctgtttggtaatcttatcgccctgtcactcgggctgacccccaactttaaatctaacttcgacctggccgaagatgccaagcttcaactgagcaaagacacctacgatgatgatctcgacaatctgctggcccagatcggcgaccagtacgcagacctttttttggcggcaaagaacctgtcagacgccattctgctgagtgatattctgcgagtgaacacggagatcaccaaagctccgctgagcgctagtatgatcaagcgctatgatgagcaccaccaagacttgactttgctgaaggcccttgtcagacagcaactgcctgagaagtacaaggaaattttcttcgatcagtctaaaaatggctacgccggatacattgacggcggagcaagccaggaggaattttacaaatttattaagcccatcttggaaaaaatggacggcaccgaggagctgctggtaaagcttaacagagaagatctgttgcgcaaacagcgcactttcgacaatggaagcatcccccaccagattcacctgggcgaactgcacgctatcctcaggcggcaagaggatttctacccctttttgaaagataacagggaaaagattgagaaaatcctcacatttcggataccctactatgtaggccccctcgcccggggaaattccagattcgcgtggatgactcgcaaatcagaagagaccatcactccctggaacttcgaggaagtcgtggataagggggcctctgcccagtccttcatcgaaaggatgactaactttgataaaaatctgcctaacgaaaaggtgcttcctaaacactctctgctgtacgagtacttcacagtttataacgagctcaccaaggtcaaatacgtcacagaagggatgagaaagccagcattcctgtctggagagcagaagaaagctatcgtggacctcctcttcaagacgaaccggaaagttaccgtgaaacagctcaaagaagactatttcaaaaagattgaatgtttcgactctgttgaaatcagcggagtggaggatcgcttcaacgcatccctgggaacgtatcacgatctcctgaaaatcattaaagacaaggacttcctggacaatgaggagaacgaggacattcttgaggacattgtcctcacccttacgttgtttgaagatagggagatgattgaagaacgcttgaaaacttacgctcatctcttcgacgacaaagtcatgaaacagctcaagaggcgccgatatacaggatgggggcggctgtcaagaaaactgatcaatgggatccgagacaagcagagtggaaagacaatcctggattttcttaagtccgatggatttgccaaccggaacttcatgcagttgatccatgatgactctctcacctttaaggaggacatccagaaagcacaagtttctggccagggggacagtcttcacgagcacatcgctaatcttgcaggtagcccagctatcaaaaagggaatactgcagaccgttaaggtcgtggatgaactcgtcaaagtaatgggaaggcataagcccgagaatatcgttatcgagatggcccgagagaaccaaactacccagaagggacagaagaacagtagggaaaggatgaagaggattgaagagggtataaaagaactggggtcccaaatccttaaggaacacccagttgaaaacacccagcttcagaatgagaagctctacctgtactacctgcagaacggcagggacatgtacgtggatcaggaactggacatcaatcggctctccgactacgacgtggatcatatcgtgccccagtcttttctcaaagatgattctattgataataaagtgttgacaagatccgataaaaatagagggaagagtgataacgtcccctcagaagaagttgtcaagaaaatgaaaaattattggcggcagctgctgaacgccaaactgatcacacaacggaagttcgataatctgactaaggctgaacgaggtggcctgtctgagttggataaagccggcttcatcaaaaggcagcttgttgagacacgccagatcaccaagcacgtggcccaaattctcgattcacgcatgaacaccaagtacgatgaaaatgacaaactgattcgagaggtgaaagttattactctgaagtctaagctggtctcagatttcagaaaggactttcagttttataaggtgagagagatcaacaattaccaccatgcgcatgatgcctacctgaatgcagtggtaggcactgcacttatcaaaaaatatcccaagcttgaatctgaatttgtttacggagactataaagtgtacgatgttaggaaaatgatcgcaaagtctgagcaggaaataggcaaggccaccgctaagtacttcttttacagcaatattatgaattttttcaagaccgagattacactggccaatggagagattcggaagcgaccacttatcgaaacaaacggagaaacaggagaaatcgtgtgggacaagggtagggatttcgcgacagtccggaaggtcctgtccatgccgcaggtgaacatcgttaaaaagaccgaagtacagaccggaggcttctccaaggaaagtatcctcccgaaaaggaacagcgacaagctgatcgcacgcaaaaaagattgggaccccaagaaatacggcggattcgattctcctacagtcgcttacagtgtactggttgtggccaaagtggagaaagggaagtctaaaaaactcaaaagcgtcaaggaactgctgggcatcacaatcatggagcgatcaagcttcgaaaaaaaccccatcgactttctcgaggcgaaaggatataaagaggtcaaaaaagacctcatcattaagcttcccaagtactctctctttgagcttgaaaacggccggaaacgaatgctcgctagtgcgggcgagctgcagaaaggtaacgagctggcactgccctctaaatacgttaatttcttgtatctggccagccactatgaaaagctcaaagggtctcccgaagataatgagcagaagcagctgttcgtggaacaacacaaacactaccttgatgagatcatcgagcaaataagcgaattctccaaaagagtgatcctcgccgacgctaacctcgataaggtgctttctgcttacaataagcacagggataagcccatcagggagcaggcagaaaacattatccacttgtttactctgaccaacttgggcgcgcctgcagccttcaagtacttcgacaccaccatagacagaaagcggtacacctctacaaaggaggtcctggacgccacactgattcatcagtcaattacggggctctatgaaacaagaatcgacctctctcagctcggtggagactaa

SEQ ID NO: 3 - protein, 229 aa, Artificial Sequence [sequence omitted]

SEQ ID NO: 4 - DNA, 690 bp, Artificial Sequence
  rAPOBEC1
atgagttccgagacaggccctgtagctgttgatcccactctgaggagaagaattgagccccacgagtttgaagtcttctttgacccccgggaacttcggaaagagacctgtctgctgtatgagatcaactggggaggaaggcacagcatctggcgacacacgagccaaaacaccaacaaacacgttgaagtcaatttcatagaaaaatttactacagaaagatacttttgtccaaacaccagatgctccattacctggttcctgtcctggagtccctgtggggagtgctccagggccattacagaatttttgagccgatacccccatgtaactctgtttatttatatagcacggctttatcaccacgcagatcctcgaaatcggcaaggactcagggaccttattagcagcggtgttactatccagatcatgacggagcaagagtctggctactgctggaggaattttgtcaactactccccttcgaatgaagctcattggccaaggtacccccatctgtgggtgaggctgtacgtactggaactctactgcatcattttaggacttccaccctgtttaaatattttaagaagaaaacaacctcaactcacgtttttcacgattgctcttcaaagctgccattaccaaaggctaccaccccacatcctgtgggccacagggttgaaataa

SEQ ID NO: 5 - protein, 208 aa, Artificial Sequence
  pmCDA1
MTDAEYVRIHEKLDIYTFKKQFFNNKKSVSHRCYVLFELKRRGERRACFWGYAVNKPQSGTERGIHAEIFSIRKVEEYLRDNPGQFTINWYSSWSPCADCAEKILEWYNQELRGNGHTLKIWACKLYYEKNARNQIGLWNLRDNGVGLNVMVSEHYQCCRKIFIQSSHNQLNENRWLEKTLKRAEKRRSELSIMIQVKILHTTKSPAV

SEQ ID NO: 6 - DNA, 627 bp, Artificial Sequence
  pmCDA1
atgaccgacgctgagtacgtgagaatccatgagaagttggacatctacacgtttaagaaacagtttttcaacaacaaaaaatccgtgtcgcatagatgctacgttctctttgaattaaaacgacggggtgaacgtagagcgtgtttttggggctatgctgtgaataaaccacagagcgggacagaacgtggcattcacgccgaaatctttagcattagaaaagtcgaagaatacctgcgcgacaaccccggacaattcacgataaattggtactcatcctggagtccttgtgcagattgcgctgaaaagatcttagaatggtataaccaggagctgcgggggaacggccacactttgaaaatctgggcttgcaaactctattacgagaaaaatgcgaggaatcaaattgggctgtggaacctcagagataacggggttgggttgaatgtaatggtaagtgaacactaccaatgttgcaggaaaatattcatccaatcgtcgcacaatcaattgaatgagaatagatggcttgagaagactttgaagcgagctgaaaaacgacggagcgagttgtccattatgattcaggtaaaaatactccacaccactaagagtcctgctgtttaa

SEQ ID NO: 7 - protein, 1700 aa, Artificial Sequence
  BE-PAPAP
MSSETGPVAVDPTLRRRIEPHEFEVFFDPRELRKETCLLYEINWGGRHSIWRHTSQNTNKHVEVNFIEKFTTERYFCPNTRCSITWFLSWSPCGECSRAITEFLSRYPHVTLFIYIARLYHHADPRNRQGLRDLISSGVTIQIMTEQESGYCWRNFVNYSPSNEAHWPRYPHLWVRLYVLELYCIILGLPPCLNILRRKQPQLTFFTIALQSCHYQRLPPHILWATGLKPAPAPMDKKYSIGLAIGTNSVGWAVITDEYKVPSKKFKVLGNTDRHSIKKNLIGALLFDSGETAEATRLKRTARRRYTRRKNRICYLQEIFSNEMAKVDDSFFHRLEESFLVEEDKKHERHPIFGNIVDEVAYHEKYPTIYHLRKKLVDSTDKADLRLIYLALAHMIKFRGHFLIEGDLNPDNSDVDKLFIQLVQTYNQLFEENPINASGVDAKAILSARLSKSRRLENLIAQLPGEKKNGLFGNLIALSLGLTPNFKSNFDLAEDAKLQLSKDTYDDDLDNLLAQIGDQYADLFLAAKNLSDAILLSDILRVNTEITKAPLSASMIKRYDEHHQDLTLLKALVRQQLPEKYKEIFFDQSKNGYAGYIDGGASQEEFYKFIKPILEKMDGTEELLVKLNREDLLRKQRTFDNGSIPHQIHLGELHAILRRQEDFYPFLKDNREKIEKILTFRIPYYVGPLARGNSRFAWMTRKSEETITPWNFEEVVDKGASAQSFIERMTNFDKNLPNEKVLPKHSLLYEYFTVYNELTKVKYVTEGMRKPAFLSGEQKKAIVDLLFKTNRKVTVKQLKEDYFKKIECFDSVEISGVEDRFNASLGTYHDLLKIIKDKDFLDNEENEDILEDIVLTLTLFEDREMIEERLKTYAHLFDDKVMKQLKRRRYTGWGRLSRKLINGIRDKQSGKTILDFLKSDGFANRNFMQLIHDDSLTFKEDIQKAQVSGQGDSLHEHIANLAGSPAIKKGILQTVKVVDELVKVMGRHKPENIVIEMARENQTTQKGQKNSRERMKRIEEGIKELGSQILKEHPVENTQLQNEKLYLYYLQNGRDMYVDQELDINRLSDYDVDHIVPQSFLKDDSIDNKVLTRSDKNRGKSDNVPSEEVVKKMKNYWRQLLNAKLITQRKFDNLTKAERGGLSELDKAGFIKRQLVETRQITKHVAQILDSRMNTKYDENDKLIREVKVITLKSKLVSDFRKDFQFYKVREINNYHHAHDAYLNAVVGTALIKKYPKLESEFVYGDYKVYDVRKMIAKSEQEIGKATAKYFFYSNIMNFFKTEITLANGEIRKRPLIETNGETGEIVWDKGRDFATVRKVLSMPQVNIVKKTEVQTGGFSKESILPKRNSDKLIARKKDWDPKKYGGFDSPTVAYSVLVVAKVEKGKSKKLKSVKELLGITIMERSSFEKNPIDFLEAKGYKEVKKDLIIKLPKYSLFELENGRKRMLASAGELQKGNELALPSKYVNFLYLASHYEKLKGSPEDNEQKQLFVEQHKHYLDEIIEQISEFSKRVILADANLDKVLSAYNKHRDKPIREQAENIIHLFTLTNLGAPAAFKYFDTTIDRKRYTSTKEVLDATLIHQSITGLYETRIDLSQLGGDSGGSTNLSDIIEKETGKQLVIQESILMLPEEVEEVIGNKPESDILVHTAYDESTDENVMLLTSDAPEYKPWALVIQDSNGENKIKMLSGGSPKKKRKV

SEQ ID NO: 8 - DNA, 5103 bp, Artificial Sequence
  BE-PAPAP
atgagttccgagacaggccctgtagctgttgatcccactctgaggagaagaattgagccccacgagtttgaagtcttctttgacccccgggaacttcggaaagagacctgtctgctgtatgagatcaactggggaggaaggcacagcatctggcgacacacgagccaaaacaccaacaaacacgttgaagtcaatttcatagaaaaatttactacagaaagatacttttgtccaaacaccagatgctccattacctggttcctgtcctggagtccctgtggggagtgctccagggccattacagaatttttgagccgatacccccatgtaactctgtttatttatatagcacggctttatcaccacgcagatcctcgaaatcggcaaggactcagggaccttattagcagcggtgttactatccagatcatgacggagcaagagtctggctactgctggaggaattttgtcaactactccccttcgaatgaagctcattggccaaggtacccccatctgtgggtgaggctgtacgtactggaactctactgcatcattttaggacttccaccctgtttaaatattttaagaagaaaacaacctcaactcacgtttttcacgattgctcttcaaagctgccattaccaaaggctaccaccccacatcctgtgggccacagggttgaaaccagctccagctccaatggacaagaagtactccattgggctcgctatcggcacaaacagcgtcggttgggccgtcattacggacgagtacaaggtgccgagcaaaaaattcaaagttctgggcaataccgatcgccacagcataaagaagaacctcattggcgccctcctgttcgactccggggagacggccgaagccacgcggctcaaaagaacagcacggcgcagatatacccgcagaaagaatcggatctgctacctgcaggagatctttagtaatgagatggctaaggtggatgactctttcttccataggctggaggagtcctttttggtggaggaggataaaaagcacgagcgccacccaatctttggcaatatcgtggacgaggtggcgtaccatgaaaagtacccaaccatatatcatctgaggaagaagcttgtagacagtactgataaggctgacttgcggttgatctatctcgcgctggcgcatatgatcaaatttcggggacacttcctcatcgagggggacctgaacccagacaacagcgatgtcgacaaactctttatccaactggttcagacttacaatcagcttttcgaagagaacccgatcaacgcatccggagttgacgccaaagcaatcctgagcgctaggctgtccaaatcccggcggctcgaaaacctcatcgcacagctccctggggagaagaagaacggcctgtttggtaatcttatcgccctgtcactcgggctgacccccaactttaaatctaacttcgacctggccgaagatgccaagcttcaactgagcaaagacacctacgatgatgatctcgacaatctgctggcccagatcggcgaccagtacgcagacctttttttggcggcaaagaacctgtcagacgccattctgctgagtgatattctgcgagtgaacacggagatcaccaaagctccgctgagcgctagtatgatcaagcgctatgatgagcaccaccaagacttgactttgctgaaggcccttgtcagacagcaactgcctgagaagtacaaggaaattttcttcgatcagtctaaaaatggctacgccggatacattgacggcggagcaagccaggaggaattttacaaatttattaagcccatcttggaaaaaatggacggcaccgaggagctgctggtaaagcttaacagagaagatctgttgcgcaaacagcgcactttcgacaatggaagcatcccccaccagattcacctgggcgaactgcacgctatcctcaggcggcaagaggatttctacccctttttgaaagataacagggaaaagattgagaaaatcctcacatttcggataccctactatgtaggccccctcgcccggggaaattccagattcgcgtggatgactcgcaaatcagaagagaccatcactccctggaacttcgaggaagtcgtggataagggggcctctgcccagtccttcatcgaaaggatgactaactttgataaaaatctgcctaacgaaaaggtgcttcctaaacactctctgctgtacgagtacttcacagtttataacgagctcaccaaggtcaaatacgtcacagaagggatgagaaagccagcattcctgtctggagagcagaagaaagctatcgtggacctcctcttcaagacgaaccggaaagttaccgtgaaacagctcaaagaagactatttcaaaaagattgaatgtttcgactctgttgaaatcagcggagtggaggatcgcttcaacgcatccctgggaacgtatcacgatctcctgaaaatcattaaagacaaggacttcctggacaatgaggagaacgaggacattcttgaggacattgtcctcacccttacgttgtttgaagatagggagatgattgaagaacgcttgaaaacttacgctcatctcttcgacgacaaagtcatgaaacagctcaagaggcgccgatatacaggatgggggcggctgtcaagaaaactgatcaatgggatccgagacaagcagagtggaaagacaatcctggattttcttaagtccgatggatttgccaaccggaacttcatgcagttgatccatgatgactctctcacctttaaggaggacatccagaaagcacaagtttctggccagggggacagtcttcacgagcacatcgctaatcttgcaggtagcccagctatcaaaaagggaatactgcagaccgttaaggtcgtggatgaactcgtcaaagtaatgggaaggcataagcccgagaatatcgttatcgagatggcccgagagaaccaaactacccagaagggacagaagaacagtagggaaaggatgaagaggattgaagagggtataaaagaactggggtcccaaatccttaaggaacacccagttgaaaacacccagcttcagaatgagaagctctacctgtactacctgcagaacggcagggacatgtacgtggatcaggaactggacatcaatcggctctccgactacgacgtggatcatatcgtgccccagtcttttctcaaagatgattctattgataataaagtgttgacaagatccgataaaaatagagggaagagtgataacgtcccctcagaagaagttgtcaagaaaatgaaaaattattggcggcagctgctgaacgccaaactgatcacacaacggaagttcgataatctgactaaggctgaacgaggtggcctgtctgagttggataaagccggcttcatcaaaaggcagcttgttgagacacgccagatcaccaagcacgtggcccaaattctcgattcacgcatgaacaccaagtacgatgaaaatgacaaactgattcgagaggtgaaagttattactctgaagtctaagctggtctcagatttcagaaaggactttcagttttataaggtgagagagatcaacaattaccaccatgcgcatgatgcctacctgaatgcagtggtaggcactgcacttatcaaaaaatatcccaagcttgaatctgaatttgtttacggagactataaagtgtacgatgttaggaaaatgatcgcaaagtctgagcaggaaataggcaaggccaccgctaagtacttcttttacagcaatattatgaattttttcaagaccgagattacactggccaatggagagattcggaagcgaccacttatcgaaacaaacggagaaacaggagaaatcgtgtgggacaagggtagggatttcgcgacagtccggaaggtcctgtccatgccgcaggtgaacatcgttaaaaagaccgaagtacagaccggaggcttctccaaggaaagtatcctcccgaaaaggaacagcgacaagctgatcgcacgcaaaaaagattgggaccccaagaaatacggcggattcgattctcctacagtcgcttacagtgtactggttgtggccaaagtggagaaagggaagtctaaaaaactcaaaagcgtcaaggaactgctgggcatcacaatcatggagcgatcaagcttcgaaaaaaaccccatcgactttctcgaggcgaaaggatataaagaggtcaaaaaagacctcatcattaagcttcccaagtactctctctttgagcttgaaaacggccggaaacgaatgctcgctagtgcgggcgagctgcagaaaggtaacgagctggcactgccctctaaatacgttaatttcttgtatctggccagccactatgaaaagctcaaagggtctcccgaagataatgagcagaagcagctgttcgtggaacaacacaaacactaccttgatgagatcatcgagcaaataagcgaattctccaaaagagtgatcctcgccgacgctaacctcgataaggtgctttctgcttacaataagcacagggataagcccatcagggagcaggcagaaaacattatccacttgtttactctgaccaacttgggcgcgcctgcagccttcaagtacttcgacaccaccatagacagaaagcggtacacctctacaaaggaggtcctggacgccacactgattcatcagtcaattacggggctctatgaaacaagaatcgacctctctcagctcggtggagactctggtggttcaactaatttatctgatattattgaaaaagaaacaggtaaacaattagttattcaagaatcaattttaatgttgccagaagaagttgaagaagttattggtaataaaccagaatctgatattttagttcatactgcttatgatgaatctactgatgaaaatgttatgttattgacttcagatgctccagaatataaaccatgggctttagttattcaagattctaatggtgaaaataaaattaaaatgttgtctggtggttcacccaagaagaagaggaaggtgtga

SEQ ID NO: 9 - protein, 1702 aa, Artificial Sequence
  BE-PAPAPAP
MSSETGPVAVDPTLRRRIEPHEFEVFFDPRELRKETCLLYEINWGGRHSIWRHTSQNTNKHVEVNFIEKFTTERYFCPNTRCSITWFLSWSPCGECSRAITEFLSRYPHVTLFIYIARLYHHADPRNRQGLRDLISSGVTIQIMTEQESGYCWRNFVNYSPSNEAHWPRYPHLWVRLYVLELYCIILGLPPCLNILRRKQPQLTFFTIALQSCHYQRLPPHILWATGLKPAPAPAPMDKKYSIGLAIGTNSVGWAVITDEYKVPSKKFKVLGNTDRHSIKKNLIGALLFDSGETAEATRLKRTARRRYTRRKNRICYLQEIFSNEMAKVDDSFFHRLEESFLVEEDKKHERHPIFGNIVDEVAYHEKYPTIYHLRKKLVDSTDKADLRLIYLALAHMIKFRGHFLIEGDLNPDNSDVDKLFIQLVQTYNQLFEENPINASGVDAKAILSARLSKSRRLENLIAQLPGEKKNGLFGNLIALSLGLTPNFKSNFDLAEDAKLQLSKDTYDDDLDNLLAQIGDQYADLFLAAKNLSDAILLSDILRVNTEITKAPLSASMIKRYDEHHQDLTLLKALVRQQLPEKYKEIFFDQSKNGYAGYIDGGASQEEFYKFIKPILEKMDGTEELLVKLNREDLLRKQRTFDNGSIPHQIHLGELHAILRRQEDFYPFLKDNREKIEKILTFRIPYYVGPLARGNSRFAWMTRKSEETITPWNFEEVVDKGASAQSFIERMTNFDKNLPNEKVLPKHSLLYEYFTVYNELTKVKYVTEGMRKPAFLSGEQKKAIVDLLFKTNRKVTVKQLKEDYFKKIECFDSVEISGVEDRFNASLGTYHDLLKIIKDKDFLDNEENEDILEDIVLTLTLFEDREMIEERLKTYAHLFDDKVMKQLKRRRYTGWGRLSRKLINGIRDKQSGKTILDFLKSDGFANRNFMQLIHDDSLTFKEDIQKAQVSGQGDSLHEHIANLAGSPAIKKGILQTVKVVDELVKVMGRHKPENIVIEMARENQTTQKGQKNSRERMKRIEEGIKELGSQILKEHPVENTQLQNEKLYLYYLQNGRDMYVDQELDINRLSDYDVDHIVPQSFLKDDSIDNKVLTRSDKNRGKSDNVPSEEVVKKMKNYWRQLLNAKLITQRKFDNLTKAERGGLSELDKAGFIKRQLVETRQITKHVAQILDSRMNTKYDENDKLIREVKVITLKSKLVSDFRKDFQFYKVREINNYHHAHDAYLNAVVGTALIKKYPKLESEFVYGDYKVYDVRKMIAKSEQEIGKATAKYFFYSNIMNFFKTEITLANGEIRKRPLIETNGETGEIVWDKGRDFATVRKVLSMPQVNIVKKTEVQTGGFSKESILPKRNSDKLIARKKDWDPKKYGGFDSPTVAYSVLVVAKVEKGKSKKLKSVKELLGITIMERSSFEKNPIDFLEAKGYKEVKKDLIIKLPKYSLFELENGRKRMLASAGELQKGNELALPSKYVNFLYLASHYEKLKGSPEDNEQKQLFVEQHKHYLDEIIEQISEFSKRVILADANLDKVLSAYNKHRDKPIREQAENIIHLFTLTNLGAPAAFKYFDTTIDRKRYTSTKEVLDATLIHQSITGLYETRIDLSQLGGDSGGSTNLSDIIEKETGKQLVIQESILMLPEEVEEVIGNKPESDILVHTAYDESTDENVMLLTSDAPEYKPWALVIQDSNGENKIKMLSGGSPKKKRKV

SEQ ID NO: 10 - DNA, 5109 bp, Artificial Sequence
  BE-PAPAPAP
atgagttccgagacaggccctgtagctgttgatcccactctgaggagaagaattgagccccacgagtttgaagtcttctttgacccccgggaacttcggaaagagacctgtctgctgtatgagatcaactggggaggaaggcacagcatctggcgacacacgagccaaaacaccaacaaacacgttgaagtcaatttcatagaaaaatttactacagaaagatacttttgtccaaacaccagatgctccattacctggttcctgtcctggagtccctgtggggagtgctccagggccattacagaatttttgagccgatacccccatgtaactctgtttatttatatagcacggctttatcaccacgcagatcctcgaaatcggcaaggactcagggaccttattagcagcggtgttactatccagatcatgacggagcaagagtctggctactgctggaggaattttgtcaactactccccttcgaatgaagctcattggccaaggtacccccatctgtgggtgaggctgtacgtactggaactctactgcatcattttaggacttccaccctgtttaaatattttaagaagaaaacaacctcaactcacgtttttcacgattgctcttcaaagctgccattaccaaaggctaccaccccacatcctgtgggccacagggttgaaaccagctccagcaccagcccctatggacaagaagtactccattgggctcgctatcggcacaaacagcgtcggttgggccgtcattacggacgagtacaaggtgccgagcaaaaaattcaaagttctgggcaataccgatcgccacagcataaagaagaacctcattggcgccctcctgttcgactccggggagacggccgaagccacgcggctcaaaagaacagcacggcgcagatatacccgcagaaagaatcggatctgctacctgcaggagatctttagtaatgagatggctaaggtggatgactctttcttccataggctggaggagtcctttttggtggaggaggataaaaagcacgagcgccacccaatctttggcaatatcgtggacgaggtggcgtaccatgaaaagtacccaaccatatatcatctgaggaagaagcttgtagacagtactgataaggctgacttgcggttgatctatctcgcgctggcgcatatgatcaaatttcggggacacttcctcatcgagggggacctgaacccagacaacagcgatgtcgacaaactctttatccaactggttcagacttacaatcagcttttcgaagagaacccgatcaacgcatccggagttgacgccaaagcaatcctgagcgctaggctgtccaaatcccggcggctcgaaaacctcatcgcacagctccctggggagaagaagaacggcctgtttggtaatcttatcgccctgtcactcgggctgacccccaactttaaatctaacttcgacctggccgaagatgccaagcttcaactgagcaaagacacctacgatgatgatctcgacaatctgctggcccagatcggcgaccagtacgcagacctttttttggcggcaaagaacctgtcagacgccattctgctgagtgatattctgcgagtgaacacggagatcaccaaagctccgctgagcgctagtatgatcaagcgctatgatgagcaccaccaagacttgactttgctgaaggcccttgtcagacagcaactgcctgagaagtacaaggaaattttcttcgatcagtctaaaaatggctacgccggatacattgacggcggagcaagccaggaggaattttacaaatttattaagcccatcttggaaaaaatggacggcaccgaggagctgctggtaaagcttaacagagaagatctgttgcgcaaacagcgcactttcgacaatggaagcatcccccaccagattcacctgggcgaactgcacgctatcctcaggcggcaagaggatttctacccctttttgaaagataacagggaaaagattgagaaaatcctcacatttcggataccctactatgtaggccccctcgcccggggaaattccagattcgcgtggatgactcgcaaatcagaagagaccatcactccctggaacttcgaggaagtcgtggataagggggcctctgcccagtccttcatcgaaaggatgactaactttgataaaaatctgcctaacgaaaaggtgcttcctaaacactctctgctgtacgagtacttcacagtttataacgagctcaccaaggtcaaatacgtcacagaagggatgagaaagccagcattcctgtctggagagcagaagaaagctatcgtggacctcctcttcaagacgaaccggaaagttaccgtgaaacagctcaaagaagactatttcaaaaagattgaatgtttcgactctgttgaaatcagcggagtggaggatcgcttcaacgcatccctgggaacgtatcacgatctcctgaaaatcattaaagacaaggacttcctggacaatgaggagaacgaggacattcttgaggacattgtcctcacccttacgttgtttgaagatagggagatgattgaagaacgcttgaaaacttacgctcatctcttcgacgacaaagtcatgaaacagctcaagaggcgccgatatacaggatgggggcggctgtcaagaaaactgatcaatgggatccgagacaagcagagtggaaagacaatcctggattttcttaagtccgatggatttgccaaccggaacttcatgcagttgatccatgatgactctctcacctttaaggaggacatccagaaagcacaagtttctggccagggggacagtcttcacgagcacatcgctaatcttgcaggtagcccagctatcaaaaagggaatactgcagaccgttaaggtcgtggatgaactcgtcaaagtaatgggaaggcataagcccgagaatatcgttatcgagatggcccgagagaaccaaactacccagaagggacagaagaacagtagggaaaggatgaagaggattgaagagggtataaaagaactggggtcccaaatccttaaggaacacccagttgaaaacacccagcttcagaatgagaagctctacctgtactacctgcagaacggcagggacatgtacgtggatcaggaactggacatcaatcggctctccgactacgacgtggatcatatcgtgccccagtcttttctcaaagatgattctattgataataaagtgttgacaagatccgataaaaatagagggaagagtgataacgtcccctcagaagaagttgtcaagaaaatgaaaaattattggcggcagctgctgaacgccaaactgatcacacaacggaagttcgataatctgactaaggctgaacgaggtggcctgtctgagttggataaagccggcttcatcaaaaggcagcttgttgagacacgccagatcaccaagcacgtggcccaaattctcgattcacgcatgaacaccaagtacgatgaaaatgacaaactgattcgagaggtgaaagttattactctgaagtctaagctggtctcagatttcagaaaggactttcagttttataaggtgagagagatcaacaattaccaccatgcgcatgatgcctacctgaatgcagtggtaggcactgcacttatcaaaaaatatcccaagcttgaatctgaatttgtttacggagactataaagtgtacgatgttaggaaaatgatcgcaaagtctgagcaggaaataggcaaggccaccgctaagtacttcttttacagcaatattatgaattttttcaagaccgagattacactggccaatggagagattcggaagcgaccacttatcgaaacaaacggagaaacaggagaaatcgtgtgggacaagggtagggatttcgcgacagtccggaaggtcctgtccatgccgcaggtgaacatcgttaaaaagaccgaagtacagaccggaggcttctccaaggaaagtatcctcccgaaaaggaacagcgacaagctgatcgcacgcaaaaaagattgggaccccaagaaatacggcggattcgattctcctacagtcgcttacagtgtactggttgtggccaaagtggagaaagggaagtctaaaaaactcaaaagcgtcaaggaactgctgggcatcacaatcatggagcgatcaagcttcgaaaaaaaccccatcgactttctcgaggcgaaaggatataaagaggtcaaaaaagacctcatcattaagcttcccaagtactctctctttgagcttgaaaacggccggaaacgaatgctcgctagtgcgggcgagctgcagaaaggtaacgagctggcactgccctctaaatacgttaatttcttgtatctggccagccactatgaaaagctcaaagggtctcccgaagataatgagcagaagcagctgttcgtggaacaacacaaacactaccttgatgagatcatcgagcaaataagcgaattctccaaaagagtgatcctcgccgacgctaacctcgataaggtgctttctgcttacaataagcacagggataagcccatcagggagcaggcagaaaacattatccacttgtttactctgaccaacttgggcgcgcctgcagccttcaagtacttcgacaccaccatagacagaaagcggtacacctctacaaaggaggtcctggacgccacactgattcatcagtcaattacggggctctatgaaacaagaatcgacctctctcagctcggtggagactctggtggttcaactaatttatctgatattattgaaaaagaaacaggtaaacaattagttattcaagaatcaattttaatgttgccagaagaagttgaagaagttattggtaataaaccagaatctgatattttagttcatactgcttatgatgaatctactgatgaaaatgttatgttattgacttcagatgctccagaatataaaccatgggctttagttattcaagattctaatggtgaaaataaaattaaaatgttgtctggtggttcacccaagaagaagaggaaggtgtga

SEQ ID NO: 11 - protein, 1660 aa, Artificial Sequence
  nCDA1Δ194-BE3
MTDAEYVRIHEKLDIYTFKKQFFNNKKSVSHRCYVLFELKRRGERRACFWGYAVNKPQSGTERGIHAEIFSIRKVEEYLRDNPGQFTINWYSSWSPCADCAEKILEWYNQELRGNGHTLKIWACKLYYEKNARNQIGLWNLRDNGVGLNVMVSEHYQCCRKIFIQSSHNQLNENRWLEKTLKRAEKRRSELSIMMDKKYSIGLAIGTNSVGWAVITDEYKVPSKKFKVLGNTDRHSIKKNLIGALLFDSGETAEATRLKRTARRRYTRRKNRICYLQEIFSNEMAKVDDSFFHRLEESFLVEEDKKHERHPIFGNIVDEVAYHEKYPTIYHLRKKLVDSTDKADLRLIYLALAHMIKFRGHFLIEGDLNPDNSDVDKLFIQLVQTYNQLFEENPINASGVDAKAILSARLSKSRRLENLIAQLPGEKKNGLFGNLIALSLGLTPNFKSNFDLAEDAKLQLSKDTYDDDLDNLLAQIGDQYADLFLAAKNLSDAILLSDILRVNTEITKAPLSASMIKRYDEHHQDLTLLKALVRQQLPEKYKEIFFDQSKNGYAGYIDGGASQEEFYKFIKPILEKMDGTEELLVKLNREDLLRKQRTFDNGSIPHQIHLGELHAILRRQEDFYPFLKDNREKIEKILTFRIPYYVGPLARGNSRFAWMTRKSEETITPWNFEEVVDKGASAQSFIERMTNFDKNLPNEKVLPKHSLLYEYFTVYNELTKVKYVTEGMRKPAFLSGEQKKAIVDLLFKTNRKVTVKQLKEDYFKKIECFDSVEISGVEDRFNASLGTYHDLLKIIKDKDFLDNEENEDILEDIVLTLTLFEDREMIEERLKTYAHLFDDKVMKQLKRRRYTGWGRLSRKLINGIRDKQSGKTILDFLKSDGFANRNFMQLIHDDSLTFKEDIQKAQVSGQGDSLHEHIANLAGSPAIKKGILQTVKVVDELVKVMGRHKPENIVIEMARENQTTQKGQKNSRERMKRIEEGIKELGSQILKEHPVENTQLQNEKLYLYYLQNGRDMYVDQELDINRLSDYDVDHIVPQSFLKDDSIDNKVLTRSDKNRGKSDNVPSEEVVKKMKNYWRQLLNAKLITQRKFDNLTKAERGGLSELDKAGFIKRQLVETRQITKHVAQILDSRMNTKYDENDKLIREVKVITLKSKLVSDFRKDFQFYKVREINNYHHAHDAYLNAVVGTALIKKYPKLESEFVYGDYKVYDVRKMIAKSEQEIGKATAKYFFYSNIMNFFKTEITLANGEIRKRPLIETNGETGEIVWDKGRDFATVRKVLSMPQVNIVKKTEVQTGGFSKESILPKRNSDKLIARKKDWDPKKYGGFDSPTVAYSVLVVAKVEKGKSKKLKSVKELLGITIMERSSFEKNPIDFLEAKGYKEVKKDLIIKLPKYSLFELENGRKRMLASAGELQKGNELALPSKYVNFLYLASHYEKLKGSPEDNEQKQLFVEQHKHYLDEIIEQISEFSKRVILADANLDKVLSAYNKHRDKPIREQAENIIHLFTLTNLGAPAAFKYFDTTIDRKRYTSTKEVLDATLIHQSITGLYETRIDLSQLGGDSGGSTNLSDIIEKETGKQLVIQESILMLPEEVEEVIGNKPESDILVHTAYDESTDENVMLLTSDAPEYKPWALVIQDSNGENKIKMLSGGSPKKKRKV

SEQ ID NO: 12 - DNA, 4983 bp, Artificial Sequence
  nCDA1Δ194-BE3
atgaccgacgctgagtacgtgagaatccatgagaagttggacatctacacgtttaagaaacagtttttcaacaacaaaaaatccgtgtcgcatagatgctacgttctctttgaattaaaacgacggggtgaacgtagagcgtgtttttggggctatgctgtgaataaaccacagagcgggacagaacgtggcattcacgccgaaatctttagcattagaaaagtcgaagaatacctgcgcgacaaccccggacaattcacgataaattggtactcatcctggagtccttgtgcagattgcgctgaaaagatcttagaatggtataaccaggagctgcgggggaacggccacactttgaaaatctgggcttgcaaactctattacgagaaaaatgcgaggaatcaaattgggctgtggaacctcagagataacggggttgggttgaatgtaatggtaagtgaacactaccaatgttgcaggaaaatattcatccaatcgtcgcacaatcaattgaatgagaatagatggcttgagaagactttgaagcgagctgaaaaacgacggagcgagttgtccattatgatggacaagaagtactccattgggctcgctatcggcacaaacagcgtcggttgggccgtcattacggacgagtacaaggtgccgagcaaaaaattcaaagttctgggcaataccgatcgccacagcataaagaagaacctcattggcgccctcctgttcgactccggggagacggccgaagccacgcggctcaaaagaacagcacggcgcagatatacccgcagaaagaatcggatctgctacctgcaggagatctttagtaatgagatggctaaggtggatgactctttcttccataggctggaggagtcctttttggtggaggaggataaaaagcacgagcgccacccaatctttggcaatatcgtggacgaggtggcgtaccatgaaaagtacccaaccatatatcatctgaggaagaagcttgtagacagtactgataaggctgacttgcggttgatctatctcgcgctggcgcatatgatcaaatttcggggacacttcctcatcgagggggacctgaacccagacaacagcgatgtcgacaaactctttatccaactggttcagacttacaatcagcttttcgaagagaacccgatcaacgcatccggagttgacgccaaagcaatcctgagcgctaggctgtccaaatcccggcggctcgaaaacctcatcgcacagctccctggggagaagaagaacggcctgtttggtaatcttatcgccctgtcactcgggctgacccccaactttaaatctaacttcgacctggccgaagatgccaagcttcaactgagcaaagacacctacgatgatgatctcgacaatctgctggcccagatcggcgaccagtacgcagacctttttttggcggcaaagaacctgtcagacgccattctgctgagtgatattctgcgagtgaacacggagatcaccaaagctccgctgagcgctagtatgatcaagcgctatgatgagcaccaccaagacttgactttgctgaaggcccttgtcagacagcaactgcctgagaagtacaaggaaattttcttcgatcagtctaaaaatggctacgccggatacattgacggcggagcaagccaggaggaattttacaaatttattaagcccatcttggaaaaaatggacggcaccgaggagctgctggtaaagcttaacagagaagatctgttgcgcaaacagcgcactttcgacaatggaagcatcccccaccagattcacctgggcgaactgcacgctatcctcaggcggcaagaggatttctacccctttttgaaagataacagggaaaagattgagaaaatcctcacatttcggataccctactatgtaggccccctcgcccggggaaattccagattcgcgtggatgactcgcaaatcagaagagaccatcactccctggaacttcgaggaagtcgtggataagggggcctctgcccagtccttcatcgaaaggatgactaactttgataaaaatctgcctaacgaaaaggtgcttcctaaacactctctgctgtacgagtacttcacagtttataacgagctcaccaaggtcaaatacgtcacagaagggatgagaaagccagcattcctgtctggagagcagaagaaagctatcgtggacctcctcttcaagacgaaccggaaagttaccgtgaaacagctcaaagaagactatttcaaaaagattgaatgtttcgactctgttgaaatcagcggagtggaggatcgcttcaacgcatccctgggaacgtatcacgatctcctgaaaatcattaaagacaaggacttcctggacaatgaggagaacgaggacattcttgaggacattgtcctcacccttacgttgtttgaagatagggagatgattgaagaacgcttgaaaacttacgctcatctcttcgacgacaaagtcatgaaacagctcaagaggcgccgatatacaggatgggggcggctgtcaagaaaactgatcaatgggatccgagacaagcagagtggaaagacaatcctggattttcttaagtccgatggatttgccaaccggaacttcatgcagttgatccatgatgactctctcacctttaaggaggacatccagaaagcacaagtttctggccagggggacagtcttcacgagcacatcgctaatcttgcaggtagcccagctatcaaaaagggaatactgcagaccgttaaggtcgtggatgaactcgtcaaagtaatgggaaggcataagcccgagaatatcgttatcgagatggcccgagagaaccaaactacccagaagggacagaagaacagtagggaaaggatgaagaggattgaagagggtataaaagaactggggtcccaaatccttaaggaacacccagttgaaaacacccagcttcagaatgagaagctctacctgtactacctgcagaacggcagggacatgtacgtggatcaggaactggacatcaatcggctctccgactacgacgtggatcatatcgtgccccagtcttttctcaaagatgattctattgataataaagtgttgacaagatccgataaaaatagagggaagagtgataacgtcccctcagaagaagttgtcaagaaaatgaaaaattattggcggcagctgctgaacgccaaactgatcacacaacggaagttcgataatctgactaaggctgaacgaggtggcctgtctgagttggataaagccggcttcatcaaaaggcagcttgttgagacacgccagatcaccaagcacgtggcccaaattctcgattcacgcatgaacaccaagtacgatgaaaatgacaaactgattcgagaggtgaaagttattactctgaagtctaagctggtctcagatttcagaaaggactttcagttttataaggtgagagagatcaacaattaccaccatgcgcatgatgcctacctgaatgcagtggtaggcactgcacttatcaaaaaatatcccaagcttgaatctgaatttgtttacggagactataaagtgtacgatgttaggaaaatgatcgcaaagtctgagcaggaaataggcaaggccaccgctaagtacttcttttacagcaatattatgaattttttcaagaccgagattacactggccaatggagagattcggaagcgaccacttatcgaaacaaacggagaaacaggagaaatcgtgtgggacaagggtagggatttcgcgacagtccggaaggtcctgtccatgccgcaggtgaacatcgttaaaaagaccgaagtacagaccggaggcttctccaaggaaagtatcctcccgaaaaggaacagcgacaagctgatcgcacgcaaaaaagattgggaccccaagaaatacggcggattcgattctcctacagtcgcttacagtgtactggttgtggccaaagtggagaaagggaagtctaaaaaactcaaaagcgtcaaggaactgctgggcatcacaatcatggagcgatcaagcttcgaaaaaaaccccatcgactttctcgaggcgaaaggatataaagaggtcaaaaaagacctcatcattaagcttcccaagtactctctctttgagcttgaaaacggccggaaacgaatgctcgctagtgcgggcgagctgcagaaaggtaacgagctggcactgccctctaaatacgttaatttcttgtatctggccagccactatgaaaagctcaaagggtctcccgaagataatgagcagaagcagctgttcgtggaacaacacaaacactaccttgatgagatcatcgagcaaataagcgaattctccaaaagagtgatcctcgccgacgctaacctcgataaggtgctttctgcttacaataagcacagggataagcccatcagggagcaggcagaaaacattatccacttgtttactctgaccaacttgggcgcgcctgcagccttcaagtacttcgacaccaccatagacagaaagcggtacacctctacaaaggaggtcctggacgccacactgattcatcagtcaattacggggctctatgaaacaagaatcgacctctctcagctcggtggagactctggtggttcaactaatttatctgatattattgaaaaagaaacaggtaaacaattagttattcaagaatcaattttaatgttgccagaagaagttgaagaagttattggtaataaaccagaatctgatattttagttcatactgcttatgatgaatctactgatgaaaatgttatgttattgacttcagatgctccagaatataaaccatgggctttagttattcaagattctaatggtgaaaataaaattaaaatgttgtctggtggttcacccaagaagaagaggaaggtgtga

SEQ ID NO: 13 - protein, 1656 aa, Artificial Sequence
  nCDA1Δ190-BE3
MTDAEYVRIHEKLDIYTFKKQFFNNKKSVSHRCYVLFELKRRGERRACFWGYAVNKPQSGTERGIHAEIFSIRKVEEYLRDNPGQFTINWYSSWSPCADCAEKILEWYNQELRGNGHTLKIWACKLYYEKNARNQIGLWNLRDNGVGLNVMVSEHYQCCRKIFIQSSHNQLNENRWLEKTLKRAEKRRSEMDKKYSIGLAIGTNSVGWAVITDEYKVPSKKFKVLGNTDRHSIKKNLIGALLFDSGETAEATRLKRTARRRYTRRKNRICYLQEIFSNEMAKVDDSFFHRLEESFLVEEDKKHERHPIFGNIVDEVAYHEKYPTIYHLRKKLVDSTDKADLRLIYLALAHMIKFRGHFLIEGDLNPDNSDVDKLFIQLVQTYNQLFEENPINASGVDAKAILSARLSKSRRLENLIAQLPGEKKNGLFGNLIALSLGLTPNFKSNFDLAEDAKLQLSKDTYDDDLDNLLAQIGDQYADLFLAAKNLSDAILLSDILRVNTEITKAPLSASMIKRYDEHHQDLTLLKALVRQQLPEKYKEIFFDQSKNGYAGYIDGGASQEEFYKFIKPILEKMDGTEELLVKLNREDLLRKQRTFDNGSIPHQIHLGELHAILRRQEDFYPFLKDNREKIEKILTFRIPYYVGPLARGNSRFAWMTRKSEETITPWNFEEVVDKGASAQSFIERMTNFDKNLPNEKVLPKHSLLYEYFTVYNELTKVKYVTEGMRKPAFLSGEQKKAIVDLLFKTNRKVTVKQLKEDYFKKIECFDSVEISGVEDRFNASLGTYHDLLKIIKDKDFLDNEENEDILEDIVLTLTLFEDREMIEERLKTYAHLFDDKVMKQLKRRRYTGWGRLSRKLINGIRDKQSGKTILDFLKSDGFANRNFMQLIHDDSLTFKEDIQKAQVSGQGDSLHEHIANLAGSPAIKKGILQTVKVVDELVKVMGRHKPENIVIEMARENQTTQKGQKNSRERMKRIEEGIKELGSQILKEHPVENTQLQNEKLYLYYLQNGRDMYVDQELDINRLSDYDVDHIVPQSFLKDDSIDNKVLTRSDKNRGKSDNVPSEEVVKKMKNYWRQLLNAKLITQRKFDNLTKAERGGLSELDKAGFIKRQLVETRQITKHVAQILDSRMNTKYDENDKLIREVKVITLKSKLVSDFRKDFQFYKVREINNYHHAHDAYLNAVVGTALIKKYPKLESEFVYGDYKVYDVRKMIAKSEQEIGKATAKYFFYSNIMNFFKTEITLANGEIRKRPLIETNGETGEIVWDKGRDFATVRKVLSMPQVNIVKKTEVQTGGFSKESILPKRNSDKLIARKKDWDPKKYGGFDSPTVAYSVLVVAKVEKGKSKKLKSVKELLGITIMERSSFEKNPIDFLEAKGYKEVKKDLIIKLPKYSLFELENGRKRMLASAGELQKGNELALPSKYVNFLYLASHYEKLKGSPEDNEQKQLFVEQHKHYLDEIIEQISEFSKRVILADANLDKVLSAYNKHRDKPIREQAENIIHLFTLTNLGAPAAFKYFDTTIDRKRYTSTKEVLDATLIHQSITGLYETRIDLSQLGGDSGGSTNLSDIIEKETGKQLVIQESILMLPEEVEEVIGNKPESDILVHTAYDESTDENVMLLTSDAPEYKPWALVIQDSNGENKIKMLSGGSPKKKRKV

SEQ ID NO: 14 - DNA, 4971 bp, Artificial Sequence
  nCDA1Δ190-BE3
atgaccgacgctgagtacgtgagaatccatgagaagttggacatctacacgtttaagaaacagtttttcaacaacaaaaaatccgtgtcgcatagatgctacgttctctttgaattaaaacgacggggtgaacgtagagcgtgtttttggggctatgctgtgaataaaccacagagcgggacagaacgtggcattcacgccgaaatctttagcattagaaaagtcgaagaatacctgcgcgacaaccccggacaattcacgataaattggtactcatcctggagtccttgtgcagattgcgctgaaaagatcttagaatggtataaccaggagctgcgggggaacggccacactttgaaaatctgggcttgcaaactctattacgagaaaaatgcgaggaatcaaattgggctgtggaacctcagagataacggggttgggttgaatgtaatggtaagtgaacactaccaatgttgcaggaaaatattcatccaatcgtcgcacaatcaattgaatgagaatagatggcttgagaagactttgaagcgagctgaaaaacgacggagcgagatggacaagaagtactccattgggctcgctatcggcacaaacagcgtcggttgggccgtcattacggacgagtacaaggtgccgagcaaaaaattcaaagttctgggcaataccgatcgccacagcataaagaagaacctcattggcgccctcctgttcgactccggggagacggccgaagccacgcggctcaaaagaacagcacggcgcagatatacccgcagaaagaatcggatctgctacctgcaggagatctttagtaatgagatggctaaggtggatgactctttcttccataggctggaggagtcctttttggtggaggaggataaaaagcacgagcgccacccaatctttggcaatatcgtggacgaggtggcgtaccatgaaaagtacccaaccatatatcatctgaggaagaagcttgtagacagtactgataaggctgacttgcggttgatctatctcgcgctggcgcatatgatcaaatttcggggacacttcctcatcgagggggacctgaacccagacaacagcgatgtcgacaaactctttatccaactggttcagacttacaatcagcttttcgaagagaacccgatcaacgcatccggagttgacgccaaagcaatcctgagcgctaggctgtccaaatcccggcggctcgaaaacctcatcgcacagctccctggggagaagaagaacggcctgtttggtaatcttatcgccctgtcactcgggctgacccccaactttaaatctaacttcgacctggccgaagatgccaagcttcaactgagcaaagacacctacgatgatgatctcgacaatctgctggcccagatcggcgaccagtacgcagacctttttttggcggcaaagaacctgtcagacgccattctgctgagtgatattctgcgagtgaacacggagatcaccaaagctccgctgagcgctagtatgatcaagcgctatgatgagcaccaccaagacttgactttgctgaaggcccttgtcagacagcaactgcctgagaagtacaaggaaattttcttcgatcagtctaaaaatggctacgccggatacattgacggcggagcaagccaggaggaattttacaaatttattaagcccatcttggaaaaaatggacggcaccgaggagctgctggtaaagcttaacagagaagatctgttgcgcaaacagcgcactttcgacaatggaagcatcccccaccagattcacctgggcgaactgcacgctatcctcaggcggcaagaggatttctacccctttttgaaagataacagggaaaagattgagaaaatcctcacatttcggataccctactatgtaggccccctcgcccggggaaattccagattcgcgtggatgactcgcaaatcagaagagaccatcactccctggaacttcgaggaagtcgtggataagggggcctctgcccagtccttcatcgaaaggatgactaactttgataaaaatctgcctaacgaaaaggtgcttcctaaacactctctgctgtacgagtacttcacagtttataacgagctcaccaaggtcaaatacgtcacagaagggatgagaaagccagcattcctgtctggagagcagaagaaagctatcgtggacctcctcttcaagacgaaccggaaagttaccgtgaaacagctcaaagaagactatttcaaaaagattgaatgtttcgactctgttgaaatcagcggagtggaggatcgcttcaacgcatccctgggaacgtatcacgatctcctgaaaatcattaaagacaaggacttcctggacaatgaggagaacgaggacattcttgaggacattgtcctcacccttacgttgtttgaagatagggagatgattgaagaacgcttgaaaacttacgctcatctcttcgacgacaaagtcatgaaacagctcaagaggcgccgatatacaggatgggggcggctgtcaagaaaactgatcaatgggatccgagacaagcagagtggaaagacaatcctggattttcttaagtccgatggatttgccaaccggaacttcatgcagttgatccatgatgactctctcacctttaaggaggacatccagaaagcacaagtttctggccagggggacagtcttcacgagcacatcgctaatcttgcaggtagcccagctatcaaaaagggaatactgcagaccgttaaggtcgtggatgaactcgtcaaagtaatgggaaggcataagcccgagaatatcgttatcgagatggcccgagagaaccaaactacccagaagggacagaagaacagtagggaaaggatgaagaggattgaagagggtataaaagaactggggtcccaaatccttaaggaacacccagttgaaaacacccagcttcagaatgagaagctctacctgtactacctgcagaacggcagggacatgtacgtggatcaggaactggacatcaatcggctctccgactacgacgtggatcatatcgtgccccagtcttttctcaaagatgattctattgataataaagtgttgacaagatccgataaaaatagagggaagagtgataacgtcccctcagaagaagttgtcaagaaaatgaaaaattattggcggcagctgctgaacgccaaactgatcacacaacggaagttcgataatctgactaaggctgaacgaggtggcctgtctgagttggataaagccggcttcatcaaaaggcagcttgttgagacacgccagatcaccaagcacgtggcccaaattctcgattcacgcatgaacaccaagtacgatgaaaatgacaaactgattcgagaggtgaaagttattactctgaagtctaagctggtctcagatttcagaaaggactttcagttttataaggtgagagagatcaacaattaccaccatgcgcatgatgcctacctgaatgcagtggtaggcactgcacttatcaaaaaatatcccaagcttgaatctgaatttgtttacggagactataaagtgtacgatgttaggaaaatgatcgcaaagtctgagcaggaaataggcaaggccaccgctaagtacttcttttacagcaatattatgaattttttcaagaccgagattacactggccaatggagagattcggaagcgaccacttatcgaaacaaacggagaaacaggagaaatcgtgtgggacaagggtagggatttcgcgacagtccggaaggtcctgtccatgccgcaggtgaacatcgttaaaaagaccgaagtacagaccggaggcttctccaaggaaagtatcctcccgaaaaggaacagcgacaagctgatcgcacgcaaaaaagattgggaccccaagaaatacggcggattcgattctcctacagtcgcttacagtgtactggttgtggccaaagtggagaaagggaagtctaaaaaactcaaaagcgtcaaggaactgctgggcatcacaatcatggagcgatcaagcttcgaaaaaaaccccatcgactttctcgaggcgaaaggatataaagaggtcaaaaaagacctcatcattaagcttcccaagtactctctctttgagcttgaaaacggccggaaacgaatgctcgctagtgcgggcgagctgcagaaaggtaacgagctggcactgccctctaaatacgttaatttcttgtatctggccagccactatgaaaagctcaaagggtctcccgaagataatgagcagaagcagctgttcgtggaacaacacaaacactaccttgatgagatcatcgagcaaataagcgaattctccaaaagagtgatcctcgccgacgctaacctcgataaggtgctttctgcttacaataagcacagggataagcccatcagggagcaggcagaaaacattatccacttgtttactctgaccaacttgggcgcgcctgcagccttcaagtacttcgacaccaccatagacagaaagcggtacacctctacaaaggaggtcctggacgccacactgattcatcagtcaattacggggctctatgaaacaagaatcgacctctctcagctcggtggagactctggtggttcaactaatttatctgatattattgaaaaagaaacaggtaaacaattagttattcaagaatcaattttaatgttgccagaagaagttgaagaagttattggtaataaaccagaatctgatattttagttcatactgcttatgatgaatctactgatgaaaatgttatgttattgacttcagatgctccagaatataaaccatgggctttagttattcaagattctaatggtgaaaataaaattaaaatgttgtctggtggttcacccaagaagaagaggaaggtgtga

SEQ ID NO: 15 - protein, 5 aa, Artificial Sequence
  peptidic linker
PAPAP

SEQ ID NO: 16 - protein, 7 aa, Artificial Sequence
  peptidic linker
PAPAPAP

SEQ ID NO: 17 - protein, 35 aa, Artificial Sequence
  AID catalytic domain
HVELLFLRYISDWDLDPGRCYRVTWFTSWSPCYDC

SEQ ID NO: 18 - protein, 35 aa, Artificial Sequence
  CDA1 catalytic domain
HAEIFSIRKVEEYLRDNPGQFTINWYSSWSPCADC

SEQ ID NO: 19 - protein, 83 aa, Artificial Sequence
  UGI
TNLSDIIEKETGKQLVIQESILMLPEEVEEVIGNKPESDILVHTAYDESTDENVMLLTSDAPEYKPWALVIQDSNGENKIKML

SEQ ID NO: 20 - protein, 7 aa, Artificial Sequence
  NLS
PKKKRKV

SEQ ID NO: 21 - protein, 4 aa, Artificial Sequence
  Linker
SGGS

SEQ ID NO: 22 - DNA, 4104 bp, Artificial Sequence
  Cas9 nickase (nCas9)
atggacaagaagtactccattgggctcgctatcggcacaaacagcgtcggttgggccgtcattacggacgagtacaaggtgccgagcaaaaaattcaaagttctgggcaataccgatcgccacagcataaagaagaacctcattggcgccctcctgttcgactccggggagacggccgaagccacgcggctcaaaagaacagcacggcgcagatatacccgcagaaagaatcggatctgctacctgcaggagatctttagtaatgagatggctaaggtggatgactctttcttccataggctggaggagtcctttttggtggaggaggataaaaagcacgagcgccacccaatctttggcaatatcgtggacgaggtggcgtaccatgaaaagtacccaaccatatatcatctgaggaagaagcttgtagacagtactgataaggctgacttgcggttgatctatctcgcgctggcgcatatgatcaaatttcggggacacttcctcatcgagggggacctgaacccagacaacagcgatgtcgacaaactctttatccaactggttcagacttacaatcagcttttcgaagagaacccgatcaacgcatccggagttgacgccaaagcaatcctgagcgctaggctgtccaaatcccggcggctcgaaaacctcatcgcacagctccctggggagaagaagaacggcctgtttggtaatcttatcgccctgtcactcgggctgacccccaactttaaatctaacttcgacctggccgaagatgccaagcttcaactgagcaaagacacctacgatgatgatctcgacaatctgctggcccagatcggcgaccagtacgcagacctttttttggcggcaaagaacctgtcagacgccattctgctgagtgatattctgcgagtgaacacggagatcaccaaagctccgctgagcgctagtatgatcaagcgctatgatgagcaccaccaagacttgactttgctgaaggcccttgtcagacagcaactgcctgagaagtacaaggaaattttcttcgatcagtctaaaaatggctacgccggatacattgacggcggagcaagccaggaggaattttacaaatttattaagcccatcttggaaaaaatggacggcaccgaggagctgctggtaaagcttaacagagaagatctgttgcgcaaacagcgcactttcgacaatggaagcatcccccaccagattcacctgggcgaactgcacgctatcctcaggcggcaagaggatttctacccctttttgaaagataacagggaaaagattgagaaaatcctcacatttcggataccctactatgtaggccccctcgcccggggaaattccagattcgcgtggatgactcgcaaatcagaagagaccatcactccctggaacttcgaggaagtcgtggataagggggcctctgcccagtccttcatcgaaaggatgactaactttgataaaaatctgcctaacgaaaaggtgcttcctaaacactctctgctgtacgagtacttcacagtttataacgagctcaccaaggtcaaatacgtcacagaagggatgagaaagccagcattcctgtctggagagcagaagaaagctatcgtggacctcctcttcaagacgaaccggaaagttaccgtgaaacagctcaaagaagactatttcaaaaagattgaatgtttcgactctgttgaaatcagcggagtggaggatcgcttcaacgcatccctgggaacgtatcacgatctcctgaaaatcattaaagacaaggacttcctggacaatgaggagaacgaggacattcttgaggacattgtcctcacccttacgttgtttgaagatagggagatgattgaagaacgcttgaaaacttacgctcatctcttcgacgacaaagtcatgaaacagctcaagaggcgccgatatacaggatgggggcggctgtcaagaaaactgatcaatgggatccgagacaagcagagtggaaagacaatcctggattttcttaagtccgatggatttgccaaccggaacttcatgcagttgatccatgatgactctctcacctttaaggaggacatccagaaagcacaagtttctggccagggggacagtcttcacgagcacatcgctaatcttgcaggtagcccagctatcaaaaagggaatactgcagaccgttaaggtcgtggatgaactcgtcaaagtaatgggaaggcataagcccgagaatatcgttatcgagatggcccgagagaaccaaactacccagaagggacagaagaacagtagggaaaggatgaagaggattgaagagggtataaaagaactggggtcccaaatccttaaggaacacccagttgaaaacacccagcttcagaatgagaagctctacctgtactacctgcagaacggcagggacatgtacgtggatcaggaactggacatcaatcggctctccgactacgacgtggatcatatcgtgccccagtcttttctcaaagatgattctattgataataaagtgttgacaagatccgataaaaatagagggaagagtgataacgtcccctcagaagaagttgtcaagaaaatgaaaaattattggcggcagctgctgaacgccaaactgatcacacaacggaagttcgataatctgactaaggctgaacgaggtggcctgtctgagttggataaagccggcttcatcaaaaggcagcttgttgagacacgccagatcaccaagcacgtggcccaaattctcgattcacgcatgaacaccaagtacgatgaaaatgacaaactgattcgagaggtgaaagttattactctgaagtctaagctggtctcagatttcagaaaggactttcagttttataaggtgagagagatcaacaattaccaccatgcgcatgatgcctacctgaatgcagtggtaggcactgcacttatcaaaaaatatcccaagcttgaatctgaatttgtttacggagactataaagtgtacgatgttaggaaaatgatcgcaaagtctgagcaggaaataggcaaggccaccgctaagtacttcttttacagcaatattatgaattttttcaagaccgagattacactggccaatggagagattcggaagcgaccacttatcgaaacaaacggagaaacaggagaaatcgtgtgggacaagggtagggatttcgcgacagtccggaaggtcctgtccatgccgcaggtgaacatcgttaaaaagaccgaagtacagaccggaggcttctccaaggaaagtatcctcccgaaaaggaacagcgacaagctgatcgcacgcaaaaaagattgggaccccaagaaatacggcggattcgattctcctacagtcgcttacagtgtactggttgtggccaaagtggagaaagggaagtctaaaaaactcaaaagcgtcaaggaactgctgggcatcacaatcatggagcgatcaagcttcgaaaaaaaccccatcgactttctcgaggcgaaaggatataaagaggtcaaaaaagacctcatcattaagcttcccaagtactctctctttgagcttgaaaacggccggaaacgaatgctcgctagtgcgggcgagctgcagaaaggtaacgagctggcactgccctctaaatacgttaatttcttgtatctggccagccactatgaaaagctcaaagggtctcccgaagataatgagcagaagcagctgttcgtggaacaacacaaacactaccttgatgagatcatcgagcaaataagcgaattctccaaaagagtgatcctcgccgacgctaacctcgataaggtgctttctgcttacaataagcacagggataagcccatcagggagcaggcagaaaacattatccacttgtttactctgaccaacttgggcgcgcctgcagccttcaagtacttcgacaccaccatagacagaaagcggtacacctctacaaaggaggtcctggacgccacactgattcatcagtcaattacggggctctatgaaacaagaatcgacctctctcagctcggtggagac

SEQ ID NO: 23 - DNA, 4104 bp, Artificial Sequence
  VQR-nCas9
atggacaagaagtactccattgggctcgctatcggcacaaacagcgtcggttgggccgtcattacggacgagtacaaggtgccgagcaaaaaattcaaagttctgggcaataccgatcgccacagcataaagaagaacctcattggcgccctcctgttcgactccggggagacggccgaagccacgcggctcaaaagaacagcacggcgcagatatacccgcagaaagaatcggatctgctacctgcaggagatctttagtaatgagatggctaaggtggatgactctttcttccataggctggaggagtcctttttggtggaggaggataaaaagcacgagcgccacccaatctttggcaatatcgtggacgaggtggcgtaccatgaaaagtacccaaccatatatcatctgaggaagaagcttgtagacagtactgataaggctgacttgcggttgatctatctcgcgctggcgcatatgatcaaatttcggggacacttcctcatcgagggggacctgaacccagacaacagcgatgtcgacaaactctttatccaactggttcagacttacaatcagcttttcgaagagaacccgatcaacgcatccggagttgacgccaaagcaatcctgagcgctaggctgtccaaatcccggcggctcgaaaacctcatcgcacagctccctggggagaagaagaacggcctgtttggtaatcttatcgccctgtcactcgggctgacccccaactttaaatctaacttcgacctggccgaagatgccaagcttcaactgagcaaagacacctacgatgatgatctcgacaatctgctggcccagatcggcgaccagtacgcagacctttttttggcggcaaagaacctgtcagacgccattctgctgagtgatattctgcgagtgaacacggagatcaccaaagctccgctgagcgctagtatgatcaagcgctatgatgagcaccaccaagacttgactttgctgaaggcccttgtcagacagcaactgcctgagaagtacaaggaaattttcttcgatcagtctaaaaatggctacgccggatacattgacggcggagcaagccaggaggaattttacaaatttattaagcccatcttggaaaaaatggacggcaccgaggagctgctggtaaagcttaacagagaagatctgttgcgcaaacagcgcactttcgacaatggaagcatcccccaccagattcacctgggcgaactgcacgctatcctcaggcggcaagaggatttctacccctttttgaaagataacagggaaaagattgagaaaatcctcacatttcggataccctactatgtaggccccctcgcccggggaaattccagattcgcgtggatgactcgcaaatcagaagagaccatcactccctggaacttcgaggaagtcgtggataagggggcctctgcccagtccttcatcgaaaggatgactaactttgataaaaatctgcctaacgaaaaggtgcttcctaaacactctctgctgtacgagtacttcacagtttataacgagctcaccaaggtcaaatacgtcacagaagggatgagaaagccagcattcctgtctggagagcagaagaaagctatcgtggacctcctcttcaagacgaaccggaaagttaccgtgaaacagctcaaagaagactatttcaaaaagattgaatgtttcgactctgttgaaatcagcggagtggaggatcgcttcaacgcatccctgggaacgtatcacgatctcctgaaaatcattaaagacaaggacttcctggacaatgaggagaacgaggacattcttgaggacattgtcctcacccttacgttgtttgaagatagggagatgattgaagaacgcttgaaaacttacgctcatctcttcgacgacaaagtcatgaaacagctcaagaggcgccgatatacaggatgggggcggctgtcaagaaaactgatcaatgggatccgagacaagcagagtggaaagacaatcctggattttcttaagtccgatggatttgccaaccggaacttcatgcagttgatccatgatgactctctcacctttaaggaggacatccagaaagcacaagtttctggccagggggacagtcttcacgagcacatcgctaatcttgcaggtagcccagctatcaaaaagggaatactgcagaccgttaaggtcgtggatgaactcgtcaaagtaatgggaaggcataagcccgagaatatcgttatcgagatggcccgagagaaccaaactacccagaagggacagaagaacagtagggaaaggatgaagaggattgaagagggtataaaagaactggggtcccaaatccttaaggaacacccagttgaaaacacccagcttcagaatgagaagctctacctgtactacctgcagaacggcagggacatgtacgtggatcaggaactggacatcaatcggctctccgactacgacgtggatcatatcgtgccccagtcttttctcaaagatgattctattgataataaagtgttgacaagatccgataaaaatagagggaagagtgataacgtcccctcagaagaagttgtcaagaaaatgaaaaattattggcggcagctgctgaacgccaaactgatcacacaacggaagttcgataatctgactaaggctgaacgaggtggcctgtctgagttggataaagccggcttcatcaaaaggcagcttgttgagacacgccagatcaccaagcacgtggcccaaattctcgattcacgcatgaacaccaagtacgatgaaaatgacaaactgattcgagaggtgaaagttattactctgaagtctaagctggtctcagatttcagaaaggactttcagttttataaggtgagagagatcaacaattaccaccatgcgcatgatgcctacctgaatgcagtggtaggcactgcacttatcaaaaaatatcccaagcttgaatctgaatttgtttacggagactataaagtgtacgatgttaggaaaatgatcgcaaagtctgagcaggaaataggcaaggccaccgctaagtacttcttttacagcaatattatgaattttttcaagaccgagattacactggccaatggagagattcggaagcgaccacttatcgaaacaaacggagaaacaggagaaatcgtgtgggacaagggtagggatttcgcgacagtccggaaggtcctgtccatgccgcaggtgaacatcgttaaaaagaccgaagtacagaccggaggcttctccaaggaaagtatcctcccgaaaaggaacagcgacaagctgatcgcacgcaaaaaagattgggaccccaagaaatacggcggattcgtttctcctacagtcgcttacagtgtactggttgtggccaaagtggagaaagggaagtctaaaaaactcaaaagcgtcaaggaactgctgggcatcacaatcatggagcgatcaagcttcgaaaaaaaccccatcgactttctcgaggcgaaaggatataaagaggtcaaaaaagacctcatcattaagcttcccaagtactctctctttgagcttgaaaacggccggaaacgaatgctcgctagtgcgggcgagctgcagaaaggtaacgagctggcactgccctctaaatacgttaatttcttgtatctggccagccactatgaaaagctcaaagggtctcccgaagataatgagcagaagcagctgttcgtggaacaacacaaacactaccttgatgagatcatcgagcaaataagcgaattctccaaaagagtgatcctcgccgacgctaacctcgataaggtgctttctgcttacaataagcacagggataagcccatcagggagcaggcagaaaacattatccacttgtttactctgaccaacttgggcgcgcctgcagccttcaagtacttcgacaccaccatagacagaaagcaatacagatctacaaaggaggtcctggacgccacactgattcatcagtcaattacggggctctatgaaacaagaatcgacctctctcagctcggtggagac

SEQ ID NO: 24 - DNA, 4104 bp, Artificial Sequence
  VRER-nCas9
atggacaagaagtactccattgggctcgctatcggcacaaacagcgtcggttgggccgtcattacggacgagtacaaggtgccgagcaaaaaattcaaagttctgggcaataccgatcgccacagcataaagaagaacctcattggcgccctcctgttcgactccggggagacggccgaagccacgcggctcaaaagaacagcacggcgcagatatacccgcagaaagaatcggatctgctacctgcaggagatctttagtaatgagatggctaaggtggatgactctttcttccataggctggaggagtcctttttggtggaggaggataaaaagcacgagcgccacccaatctttggcaatatcgtggacgaggtggcgtaccatgaaaagtacccaaccatatatcatctgaggaagaagcttgtagacagtactgataaggctgacttgcggttgatctatctcgcgctggcgcatatgatcaaatttcggggacacttcctcatcgagggggacctgaacccagacaacagcgatgtcgacaaactctttatccaactggttcagacttacaatcagcttttcgaagagaacccgatcaacgcatccggagttgacgccaaagcaatcctgagcgctaggctgtccaaatcccggcggctcgaaaacctcatcgcacagctccctggggagaagaagaacggcctgtttggtaatcttatcgccctgtcactcgggctgacccccaactttaaatctaacttcgacctggccgaagatgccaagcttcaactgagcaaagacacctacgatgatgatctcgacaatctgctggcccagatcggcgaccagtacgcagacctttttttggcggcaaagaacctgtcagacgccattctgctgagtgatattctgcgagtgaacacggagatcaccaaagctccgctgagcgctagtatgatcaagcgctatgatgagcaccaccaagacttgactttgctgaaggcccttgtcagacagcaactgcctgagaagtacaaggaaattttcttcgatcagtctaaaaatggctacgccggatacattgacggcggagcaagccaggaggaattttacaaatttattaagcccatcttggaaaaaatggacggcaccgaggagctgctggtaaagcttaacagagaagatctgttgcgcaaacagcgcactttcgacaatggaagcatcccccaccagattcacctgggcgaactgcacgctatcctcaggcggcaagaggatttctacccctttttgaaagataacagggaaaagattgagaaaatcctcacatttcggataccctactatgtaggccccctcgcccggggaaattccagattcgcgtggatgactcgcaaatcagaagagaccatcactccctggaacttcgaggaagtcgtggataagggggcctctgcccagtccttcatcgaaaggatgactaactttgataaaaatctgcctaacgaaaaggtgcttcctaaacactctctgctgtacgagtacttcacagtttataacgagctcaccaaggtcaaatacgtcacagaagggatgagaaagccagcattcctgtctggagagcagaagaaagctatcgtggacctcctcttcaagacgaaccggaaagttaccgtgaaacagctcaaagaagactatttcaaaaagattgaatgtttcgactctgttgaaatcagcggagtggaggatcgcttcaacgcatccctgggaacgtatcacgatctcctgaaaatcattaaagacaaggacttcctggacaatgaggagaacgaggacattcttgaggacattgtcctcacccttacgttgtttgaagatagggagatgattgaagaacgcttgaaaacttacgctcatctcttcgacgacaaagtcatgaaacagctcaagaggcgccgatatacaggatgggggcggctgtcaagaaaactgatcaatgggatccgagacaagcagagtggaaagacaatcctggattttcttaagtccgatggatttgccaaccggaacttcatgcagttgatccatgatgactctctcacctttaaggaggacatccagaaagcacaagtttctggccagggggacagtcttcacgagcacatcgctaatcttgcaggtagcccagctatcaaaaagggaatactgcagaccgttaaggtcgtggatgaactcgtcaaagtaatgggaaggcataagcccgagaatatcgttatcgagatggcccgagagaaccaaactacccagaagggacagaagaacagtagggaaaggatgaagaggattgaagagggtataaaagaactggggtcccaaatccttaaggaacacccagttgaaaacacccagcttcagaatgagaagctctacctgtactacctgcagaacggcagggacatgtacgtggatcaggaactggacatcaatcggctctccgactacgacgtggatcatatcgtgccccagtcttttctcaaagatgattctattgataataaagtgttgacaagatccgataaaaatagagggaagagtgataacgtcccctcagaagaagttgtcaagaaaatgaaaaattattggcggcagctgctgaacgccaaactgatcacacaacggaagttcgataatctgactaaggctgaacgaggtggcctgtctgagttggataaagccggcttcatcaaaaggcagcttgttgagacacgccagatcaccaagcacgtggcccaaattctcgattcacgcatgaacaccaagtacgatgaaaatgacaaactgattcgagaggtgaaagttattactctgaagtctaagctggtctcagatttcagaaaggactttcagttttataaggtgagagagatcaacaattaccaccatgcgcatgatgcctacctgaatgcagtggtaggcactgcacttatcaaaaaatatcccaagcttgaatctgaatttgtttacggagactataaagtgtacgatgttaggaaaatgatcgcaaagtctgagcaggaaataggcaaggccaccgctaagtacttcttttacagcaatattatgaattttttcaagaccgagattacactggccaatggagagattcggaagcgaccacttatcgaaacaaacggagaaacaggagaaatcgtgtgggacaagggtagggatttcgcgacagtccggaaggtcctgtccatgccgcaggtgaacatcgttaaaaagaccgaagtacagaccggaggcttctccaaggaaagtatcctcccgaaaaggaacagcgacaagctgatcgcacgcaaaaaagattgggaccccaagaaatacggcggattcgtttctcctacagtcgcttacagtgtactggttgtggccaaagtggagaaagggaagtctaaaaaactcaaaagcgtcaaggaactgctgggcatcacaatcatggagcgatcaagcttcgaaaaaaaccccatcgactttctcgaggcgaaaggatataaagaggtcaaaaaagacctcatcattaagcttcccaagtactctctctttgagcttgaaaacggccggaaacgaatgctcgctagtgcgcgcgagctgcagaaaggtaacgagctggcactgccctctaaatacgttaatttcttgtatctggccagccactatgaaaagctcaaagggtctcccgaagataatgagcagaagcagctgttcgtggaacaacacaaacactaccttgatgagatcatcgagcaaataagcgaattctccaaaagagtgatcctcgccgacgctaacctcgataaggtgctttctgcttacaataagcacagggataagcccatcagggagcaggcagaaaacattatccacttgtttactctgaccaacttgggcgcgcctgcagccttcaagtacttcgacaccaccatagacagaaaggaatacagatctacaaaggaggtcctggacgccacactgattcatcagtcaattacggggctctatgaaacaagaatcgacctctctcagctcggtggagac

SEQ ID NO: 25 - DNA, 4104 bp, Artificial Sequence
  x-nCas9
atggacaagaagtactccattgggctcgctatcggcacaaacagcgtcggttgggccgtcattacggacgagtacaaggtgccgagcaaaaaattcaaagttctgggcaataccgatcgccacagcataaagaagaacctcattggcgccctcctgttcgactccggggagacggccgaagccacgcggctcaaaagaacagcacggcgcagatatacccgcagaaagaatcggatctgctacctgcaggagatctttagtaatgagatggctaaggtggatgactctttcttccataggctggaggagtcctttttggtggaggaggataaaaagcacgagcgccacccaatctttggcaatatcgtggacgaggtggcgtaccatgaaaagtacccaaccatatatcatctgaggaagaagcttgtagacagtactgataaggctgacttgcggttgatctatctcgcgctggcgcatatgatcaaatttcggggacacttcctcatcgagggggacctgaacccagacaacagcgatgtcgacaaactctttatccaactggttcagacttacaatcagcttttcgaagagaacccgatcaacgcatccggagttgacgccaaagcaatcctgagcgctaggctgtccaaatcccggcggctcgaaaacctcatcgcacagctccctggggagaagaagaacggcctgtttggtaatcttatcgccctgtccctcgggctgacccccaactttaaatctaacttcgacctggccgaagataccaagcttcaactgagcaaagacacctacgatgatgatctcgacaatctgctggcccagatcggcgaccagtacgcagacctttttttggcggcaaagaacctgtcagacgccattctgctgagtgatattctgcgagtgaacacggagatcaccaaagctccgctgagcgctagtatgatcaagctctatgatgagcaccaccaagacttgactttgctgaaggcccttgtcagacagcaactgcctgagaagtacaaggaaattttcttcgatcagtctaaaaatggctacgccggatacattgacggcggagcaagccaggaggaattttacaaatttattaagcccatcttggaaaaaatggacggcaccgaggagctgctggtaaagcttaacagagaagatctgttgcgcaaacagcgcactttcgacaatggaatcatcccccaccagattcacctgggcgaactgcacgctatcctcaggcggcaagaggatttctacccctttttgaaagataacagggaaaagattgagaaaatcctcacatttcggataccctactatgtaggccccctcgcccggggaaattccagattcgcgtggatgactcgcaaatcagaagagaccatcactccctggaacttcgagaaagtcgtggataagggggcctctgcccagtccttcatcgaaaggatgactaactttgataaaaatctgcctaacgaaaaggtgcttcctaaacactctctgctgtacgagtacttcacagtttataacgagctcaccaaggtcaaatacgtcacagaagggatgagaaagccagcattcctgtctggagatcagaagaaagctattgtggacctcctcttcaagacgaaccggaaagttaccgtgaaacagctcaaagaagactatttcaaaaagattgaatgtttcgactctgttgaaatcagcggagtggaggatcgcttcaacgcatccctgggaacgtatcacgatctcctgaaaatcattaaagacaaggacttcctggacaatgaggagaacgaggacattcttgaggacattgtcctcacccttacgttgtttgaagatagggagatgattgaagaacgcttgaaaacttacgctcatctcttcgacgacaaagtcatgaagcagctcaagaggcgccgatatacaggatgggggcggctgtcaagaaaactgatcaatgggatccgagacaagcagagtggaaagacaatcctggattttcttaagtccgatggatttgccaaccggaacttcattcagttgatccatgatgactctctcacctttaaggaggacatccagaaagcacaagtttctggccagggggacagtcttcacgagcacatcgctaatcttgcaggtagcccagctatcaaaaagggaatactgcagaccgttaaggtcgtggatgaactcgtcaaagtaatgggaaggcataagcccgagaatatcgttatcgagatggcccgagagaaccaaaccacccagaagggacagaagaacagtagggaaaggatgaagaggattgaagagggtataaaagaactggggtcccaaatccttaaggaacacccagttgaaaacacccagcttcagaatgagaagctctacctgtactacctgcagaacggcagggacatgtacgtggatcaggaactggacatcaatcggctctccgactacgacgtggatcatatcgtgccccagtcttttctcaaagatgattctattgataataaagtgttgacaagatccgataaaaacagagggaagagtgataacgtcccctcagaagaagttgtcaagaaaatgaaaaattattggcggcagctgctgaacgccaaactgatcacacaacggaagttcgataatctgactaaggctgaacgaggtggcctgtctgagttggataaagccggtttcatcaaaaggcagcttgttgagacacgccagatcaccaagcacgtggcccaaattctcgattcacgcatgaacaccaagtacgatgaaaatgacaaactgattcgagaggtgaaagttattactctgaagtctaagctggtctcagatttcagaaaggactttcagttttataaggtgagagagatcaacaattaccaccatgcgcatgatgcctacctgaatgcagtggtaggcactgcacttatcaaaaaatatcccaagcttgaatctgaatttgtttacggagactataaagtgtacgatgttaggaaaatgatcgcaaagtctgagcaggaaataggcaaggccaccgctaagtacttcttttacagcaatattatgaattttttcaagaccgagattacactggccaatggagagattcggaagcgaccacttatcgaaacaaacggagaaacaggagaaatcgtgtgggacaagggtagggatttcgcgacagtccggaaggtcctgtccatgccgcaggtgaacatcgttaaaaagaccgaagtacagaccggaggcttctccaaggaaagtatcctcccgaaaaggaacagcgacaagctgatcgcacgcaaaaaagattgggaccccaagaaatacggcggattcgattctcctacagtcgcttacagtgtactggttgtggctaaagtggagaaagggaagtctaaaaaactcaaaagcgtcaaggaactgctgggcatcacaatcatggagcgatcaagcttcgaaaaaaaccccatcgactttctcgaggcgaaaggatataaagaggtcaaaaaagacctcatcattaagcttcccaagtactctctctttgagcttgaaaacggccggaaacgaatgctcgctagtgcgggcgtgctgcagaaaggtaacgagctggcactgccctctaaatacgttaatttcttgtatctggccagccactatgaaaagctcaaagggtctcccgaagataatgagcagaagcagctgttcgtggaacaacacaaacactaccttgatgagatcatcgagcaaataagcgaattctccaaaagagtgatcctcgccgacgctaacctcgataaggtgctttctgcttacaataagcacagggataagcccatcagggagcaggcagaaaacattatccacttgtttactctgaccaacttgggcgcgcctgcagccttcaagtacttcgacaccaccatagacagaaagcggtacacctctacaaaggaggtcctggacgccacactgattcatcagtcaattacggggctctatgaaacaagaatcgacctctctcagctcggtggagac

SEQ ID NO: 26 - DNA, 4104 bp, Artificial Sequence
  NG-nCas9
atggacaagaagtactccattgggctcgctatcggcacaaacagcgtcggttgggccgtcattacggacgagtacaaggtgccgagcaaaaaattcaaagttctgggcaataccgatcgccacagcataaagaagaacctcattggcgccctcctgttcgactccggggagacggccgaagccacgcggctcaaaagaacagcacggcgcagatatacccgcagaaagaatcggatctgctacctgcaggagatctttagtaatgagatggctaaggtggatgactctttcttccataggctggaggagtcctttttggtggaggaggataaaaagcacgagcgccacccaatctttggcaatatcgtggacgaggtggcgtaccatgaaaagtacccaaccatatatcatctgaggaagaagcttgtagacagtactgataaggctgacttgcggttgatctatctcgcgctggcgcatatgatcaaatttcggggacacttcctcatcgagggggacctgaacccagacaacagcgatgtcgacaaactctttatccaactggttcagacttacaatcagcttttcgaagagaacccgatcaacgcatccggagttgacgccaaagcaatcctgagcgctaggctgtccaaatcccggcggctcgaaaacctcatcgcacagctccctggggagaagaagaacggcctgtttggtaatcttatcgccctgtcactcgggctgacccccaactttaaatctaacttcgacctggccgaagatgccaagcttcaactgagcaaagacacctacgatgatgatctcgacaatctgctggcccagatcggcgaccagtacgcagacctttttttggcggcaaagaacctgtcagacgccattctgctgagtgatattctgcgagtgaacacggagatcaccaaagctccgctgagcgctagtatgatcaagcgctatgatgagcaccaccaagacttgactttgctgaaggcccttgtcagacagcaactgcctgagaagtacaaggaaattttcttcgatcagtctaaaaatggctacgccggatacattgacggcggagcaagccaggaggaattttacaaatttattaagcccatcttggaaaaaatggacggcaccgaggagctgctggtaaagcttaacagagaagatctgttgcgcaaacagcgcactttcgacaatggaagcatcccccaccagattcacctgggcgaactgcacgctatcctcaggcggcaagaggatttctacccctttttgaaagataacagggaaaagattgagaaaatcctcacatttcggataccctactatgtaggccccctcgcccggggaaattccagattcgcgtggatgactcgcaaatcagaagagaccatcactccctggaacttcgaggaagtcgtggataagggggcctctgcccagtccttcatcgaaaggatgactaactttgataaaaatctgcctaacgaaaaggtgcttcctaaacactctctgctgtacgagtacttcacagtttataacgagctcaccaaggtcaaatacgtcacagaagggatgagaaagccagcattcctgtctggagagcagaagaaagctatcgtggacctcctcttcaagacgaaccggaaagttaccgtgaaacagctcaaagaagactatttcaaaaagattgaatgtttcgactctgttgaaatcagcggagtggaggatcgcttcaacgcatccctgggaacgtatcacgatctcctgaaaatcattaaagacaaggacttcctggacaatgaggagaacgaggacattcttgaggacattgtcctcacccttacgttgtttgaagatagggagatgattgaagaacgcttgaaaacttacgctcatctcttcgacgacaaagtcatgaaacagctcaagaggcgccgatatacaggatgggggcggctgtcaagaaaactgatcaatgggatccgagacaagcagagtggaaagacaatcctggattttcttaagtccgatggatttgccaaccggaacttcatgcagttgatccatgatgactctctcacctttaaggaggacatccagaaagcacaagtttctggccagggggacagtcttcacgagcacatcgctaatcttgcaggtagcccagctatcaaaaagggaatactgcagaccgttaaggtcgtggatgaactcgtcaaagtaatgggaaggcataagcccgagaatatcgttatcgagatggcccgagagaaccaaactacccagaagggacagaagaacagtagggaaaggatgaagaggattgaagagggtataaaagaactggggtcccaaatccttaaggaacacccagttgaaaacacccagcttcagaatgagaagctctacctgtactacctgcagaacggcagggacatgtacgtggatcaggaactggacatcaatcggctctccgactacgacgtggatcatatcgtgccccagtcttttctcaaagatgattctattgataataaagtgttgacaagatccgataaaaatagagggaagagtgataacgtcccctcagaagaagttgtcaagaaaatgaaaaattattggcggcagctgctgaacgccaaactgatcacacaacggaagttcgataatctgactaaggctgaacgaggtggcctgtctgagttggataaagccggcttcatcaaaaggcagcttgttgagacacgccagatcaccaagcacgtggcccaaattctcgattcacgcatgaacaccaagtacgatgaaaatgacaaactgattcgagaggtgaaagttattactctgaagtctaagctggtctcagatttcagaaaggactttcagttttataaggtgagagagatcaacaattaccaccatgcgcatgatgcctacctgaatgcagtggtaggcactgcacttatcaaaaaatatcccaagcttgaatctgaatttgtttacggagactataaagtgtacgatgttaggaaaatgatcgcaaagtctgagcaggaaataggcaaggccaccgctaagtacttcttttacagcaatattatgaattttttcaagaccgagattacactggccaatggagagattcggaagcgaccacttatcgaaacaaacggagaaacaggagaaatcgtgtgggacaagggtagggatttcgcgacagtccggaaggtcctgtccatgccgcaggtgaacatcgttaaaaagaccgaagtacagaccggaggcttctccaaggaaagtatccgcccgaaaaggaacagcgacaagctgatcgcacgcaaaaaagattgggaccccaagaaatacggcggattcgtttctcctacagtcgcttacagtgtactggttgtggccaaagtggagaaagggaagtctaaaaaactcaaaagcgtcaaggaactgctgggcatcacaatcatggagcgatcaagcttcgaaaaaaaccccatcgactttctcgaggcgaaaggatataaagaggtcaaaaaagacctcatcattaagcttcccaagtactctctctttgagcttgaaaacggccggaaacgaatgctcgctagtgcgcgcttcctgcagaaaggtaacgagctggcactgccctctaaatacgttaatttcttgtatctggccagccactatgaaaagctcaaagggtctcccgaagataatgagcagaagcagctgttcgtggaacaacacaaacactaccttgatgagatcatcgagcaaataagcgaattctccaaaagagtgatcctcgccgacgctaacctcgataaggtgctttctgcttacaataagcacagggataagcccatcagggagcaggcagaaaacattatccacttgtttactctgaccaacttgggcgcgcctcgagccttcaagtacttcgacaccaccatagacagaaaggtatacagatctacaaaggaggtcctggacgccacactgattcatcagtcaattacggggctctatgaaacaagaatcgacctctctcagctcggtggagac

SEQ ID NO: 27 - DNA, 687 bp, Artificial Sequence
  rAPOBEC1
atgagttccgagacaggccctgtagctgttgatcccactctgaggagaagaattgagccccacgagtttgaagtcttctttgacccccgggaacttcggaaagagacctgtctgctgtatgagatcaactggggaggaaggcacagcatctggcgacacacgagccaaaacaccaacaaacacgttgaagtcaatttcatagaaaaatttactacagaaagatacttttgtccaaacaccagatgctccattacctggttcctgtcctggagtccctgtggggagtgctccagggccattacagaatttttgagccgatacccccatgtaactctgtttatttatatagcacggctttatcaccacgcagatcctcgaaatcggcaaggactcagggaccttattagcagcggtgttactatccagatcatgacggagcaagagtctggctactgctggaggaattttgtcaactactccccttcgaatgaagctcattggccaaggtacccccatctgtgggtgaggctgtacgtactggaactctactgcatcattttaggacttccaccctgtttaaatattttaagaagaaaacaacctcaactcacgtttttcacgattgctcttcaaagctgccattaccaaaggctaccaccccacatcctgtgggccacagggttgaaa

SEQ ID NO: 28 - DNA, 627 bp, Artificial Sequence; identical to SEQ ID NO: 6
  pmCDA1

SEQ ID NO: 29 - DNA, 597 bp, Artificial Sequence
  hAPOBEC3A(A3A)
atggaagccagcccagcatccgggcccagacacttgatggatccacacatattcacttccaactttaacaatggcattggaaggcataagacctacctgtgctacgaagtggagcgcctggacaatggcacctcggtcaagatggaccagcacaggggctttctacacaaccaggctaagaatcttctctgtggcttttacggccgccatgcggagctgcgcttcttggacctggttccttctttgcagttggacccggcccagatctacagggtcacttggttcatctcctggagcccctgcttctcctggggctgtgccggggaagtgcgtgcgttccttcaggagaacacacacgtgagactgcgtatcttcgctgcccgcatctatgattacgaccccctatataaggaggcactgcaaatgctgcgggatgctggggcccaagtctccatcatgacctacgatgaatttaagcactgctgggacacctttgtggaccaccagggatgtcccttccagccctgggatggactagatgagcacagccaagccctgagtgggaggctgcgggccattctccagaatcagggaaac

SEQ ID NO: 30 - DNA, 5133 bp, Artificial Sequence
  BE3
atgagttccgagacaggccctgtagctgttgatcccactctgaggagaagaattgagccccacgagtttgaagtcttctttgacccccgggaacttcggaaagagacctgtctgctgtatgagatcaactggggaggaaggcacagcatctggcgacacacgagccaaaacaccaacaaacacgttgaagtcaatttcatagaaaaatttactacagaaagatacttttgtccaaacaccagatgctccattacctggttcctgtcctggagtccctgtggggagtgctccagggccattacagaatttttgagccgatacccccatgtaactctgtttatttatatagcacggctttatcaccacgcagatcctcgaaatcggcaaggactcagggaccttattagcagcggtgttactatccagatcatgacggagcaagagtctggctactgctggaggaattttgtcaactactccccttcgaatgaagctcattggccaaggtacccccatctgtgggtgaggctgtacgtactggaactctactgcatcattttaggacttccaccctgtttaaatattttaagaagaaaacaacctcaactcacgtttttcacgattgctcttcaaagctgccattaccaaaggctaccaccccacatcctgtgggccacagggttgaaatctggttctgaaactccaggtacttctgaatctgctactccagaatctatggacaagaagtactccattgggctcgctatcggcacaaacagcgtcggttgggccgtcattacggacgagtacaaggtgccgagcaaaaaattcaaagttctgggcaataccgatcgccacagcataaagaagaacctcattggcgccctcctgttcgactccggggagacggccgaagccacgcggctcaaaagaacagcacggcgcagatatacccgcagaaagaatcggatctgctacctgcaggagatctttagtaatgagatggctaaggtggatgactctttcttccataggctggaggagtcctttttggtggaggaggataaaaagcacgagcgccacccaatctttggcaatatcgtggacgaggtggcgtaccatgaaaagtacccaaccatatatcatctgaggaagaagcttgtagacagtactgataaggctgacttgcggttgatctatctcgcgctggcgcatatgatcaaatttcggggacacttcctcatcgagggggacctgaacccagacaacagcgatgtcgacaaactctttatccaactggttcagacttacaatcagcttttcgaagagaacccgatcaacgcatccggagttgacgccaaagcaatcctgagcgctaggctgtccaaatcccggcggctcgaaaacctcatcgcacagctccctggggagaagaagaacggcctgtttggtaatcttatcgccctgtcactcgggctgacccccaactttaaatctaacttcgacctggccgaagatgccaagcttcaactgagcaaagacacctacgatgatgatctcgacaatctgctggcccagatcggcgaccagtacgcagacctttttttggcggcaaagaacctgtcagacgccattctgctgagtgatattctgcgagtgaacacggagatcaccaaagctccgctgagcgctagtatgatcaagcgctatgatgagcaccaccaagacttgactttgctgaaggcccttgtcagacagcaactgcctgagaagtacaaggaaattttcttcgatcagtctaaaaatggctacgccggatacattgacggcggagcaagccaggaggaattttacaaatttattaagcccatcttggaaaaaatggacggcaccgaggagctgctggtaaagcttaacagagaagatctgttgcgcaaacagcgcactttcgacaatggaagcatcccccaccagattcacctgggcgaactgcacgctatcctcaggcggcaagaggatttctacccctttttgaaagataacagggaaaagattgagaaaatcctcacatttcggataccctactatgtaggccccctcgcccggggaaattccagattcgcgtggatgactcgcaaatcagaagagaccatcactccctggaacttcgaggaagtcgtggataagggggcctctgcccagtccttcatcgaaaggatgactaactttgataaaaatctgcctaacgaaaaggtgcttcctaaacactctctgctgtacgagtacttcacagtttataacgagctcaccaaggtcaaatacgtcacagaagggatgagaaagccagcattcctgtctggagagcagaagaaagctatcgtggacctcctcttcaagacgaaccggaaagttaccgtgaaacagctcaaagaagactatttcaaaaagattgaatgtttcgactctgttgaaatcagcggagtggaggatcgcttcaacgcatccctgggaacgtatcacgatctcctgaaaatcattaaagacaaggacttcctggacaatgaggagaacgaggacattcttgaggacattgtcctcacccttacgttgtttgaagatagggagatgattgaagaacgcttgaaaacttacgctcatctcttcgacgacaaagtcatgaaacagctcaagaggcgccgatatacaggatgggggcggctgtcaagaaaactgatcaatgggatccgagacaagcagagtggaaagacaatcctggattttcttaagtccgatggatttgccaaccggaacttcatgcagttgatccatgatgactctctcacctttaaggaggacatccagaaagcacaagtttctggccagggggacagtcttcacgagcacatcgctaatcttgcaggtagcccagctatcaaaaagggaatactgcagaccgttaaggtcgtggatgaactcgtcaaagtaatgggaaggcataagcccgagaatatcgttatcgagatggcccgagagaaccaaactacccagaagggacagaagaacagtagggaaaggatgaagaggattgaagagggtataaaagaactggggtcccaaatccttaaggaacacccagttgaaaacacccagcttcagaatgagaagctctacctgtactacctgcagaacggcagggacatgtacgtggatcaggaactggacatcaatcggctctccgactacgacgtggatcatatcgtgccccagtcttttctcaaagatgattctattgataataaagtgttgacaagatccgataaaaatagagggaagagtgataacgtcccctcagaagaagttgtcaagaaaatgaaaaattattggcggcagctgctgaacgccaaactgatcacacaacggaagttcgataatctgactaaggctgaacgaggtggcctgtctgagttggataaagccggcttcatcaaaaggcagcttgttgagacacgccagatcaccaagcacgtggcccaaattctcgattcacgcatgaacaccaagtacgatgaaaatgacaaactgattcgagaggtgaaagttattactctgaagtctaagctggtctcagatttcagaaaggactttcagttttataaggtgagagagatcaacaattaccaccatgcgcatgatgcctacctgaatgcagtggtaggcactgcacttatcaaaaaatatcccaagcttgaatctgaatttgtttacggagactataaagtgtacgatgttaggaaaatgatcgcaaagtctgagcaggaaataggcaaggccaccgctaagtacttcttttacagcaatattatgaattttttcaagaccgagattacactggccaatggagagattcggaagcgaccacttatcgaaacaaacggagaaacaggagaaatcgtgtgggacaagggtagggatttcgcgacagtccggaaggtcctgtccatgccgcaggtgaacatcgttaaaaagaccgaagtacagaccggaggcttctccaaggaaagtatcctcccgaaaaggaacagcgacaagctgatcgcacgcaaaaaagattgggaccccaagaaatacggcggattcgattctcctacagtcgcttacagtgtactggttgtggccaaagtggagaaagggaagtctaaaaaactcaaaagcgtcaaggaactgctgggcatcacaatcatggagcgatcaagcttcgaaaaaaaccccatcgactttctcgaggcgaaaggatataaagaggtcaaaaaagacctcatcattaagcttcccaagtactctctctttgagcttgaaaacggccggaaacgaatgctcgctagtgcgggcgagctgcagaaaggtaacgagctggcactgccctctaaatacgttaatttcttgtatctggccagccactatgaaaagctcaaagggtctcccgaagataatgagcagaagcagctgttcgtggaacaacacaaacactaccttgatgagatcatcgagcaaataagcgaattctccaaaagagtgatcctcgccgacgctaacctcgataaggtgctttctgcttacaataagcacagggataagcccatcagggagcaggcagaaaacattatccacttgtttactctgaccaacttgggcgcgcctgcagccttcaagtacttcgacaccaccatagacagaaagcggtacacctctacaaaggaggtcctggacgccacactgattcatcagtcaattacggggctctatgaaacaagaatcgacctctctcagctcggtggagactctggtggttcaactaatttatctgatattattgaaaaagaaacaggtaaacaattagttattcaagaatcaattttaatgttgccagaagaagttgaagaagttattggtaataaaccagaatctgatattttagttcatactgcttatgatgaatctactgatgaaaatgttatgttattgacttcagatgctccagaatataaaccatgggctttagttattcaagattctaatggtgaaaataaaattaaaatgttgtctggtggttcacccaagaagaagaggaaggtg

SEQ ID NO: 31 - DNA, 687 bp, Artificial Sequence; identical to SEQ ID NO: 27
  Deaminase APOBEC1

SEQ ID NO: 32 - DNA, 48 bp, Artificial Sequence
  XTEN linker
tctggttctgaaactccaggtacttctgaatctgctactccagaatct

SEQ ID NO: 33 - DNA, 4104 bp, Artificial Sequence; identical to SEQ ID NO: 22
  nCas9

SEQ ID NO: 34 - DNA, 12 bp, Artificial Sequence
  SGGS linker
tctggtggttca

SEQ ID NO: 35 - DNA, 249 bp, Artificial Sequence
  UGI
actaatttatctgatattattgaaaaagaaacaggtaaacaattagttattcaagaatcaattttaatgttgccagaagaagttgaagaagttattggtaataaaccagaatctgatattttagttcatactgcttatgatgaatctactgatgaaaatgttatgttattgacttcagatgctccagaatataaaccatgggctttagttattcaagattctaatggtgaaaataaaattaaaatgttg

SEQ ID NO: 36 - DNA, 12 bp, Artificial Sequence
  SGGS linker
tctggtggttca

SEQ ID NO: 37 - DNA, 21 bp, Artificial Sequence
  NLS
cccaagaagaagaggaaggtg

SEQ ID NO: 38 - DNA, 5100 bp, Artificial Sequence
  BE-PAPAP
atgagttccgagacaggccctgtagctgttgatcccactctgaggagaagaattgagccccacgagtttgaagtcttctttgacccccgggaacttcggaaagagacctgtctgctgtatgagatcaactggggaggaaggcacagcatctggcgacacacgagccaaaacaccaacaaacacgttgaagtcaatttcatagaaaaatttactacagaaagatacttttgtccaaacaccagatgctccattacctggttcctgtcctggagtccctgtggggagtgctccagggccattacagaatttttgagccgatacccccatgtaactctgtttatttatatagcacggctttatcaccacgcagatcctcgaaatcggcaaggactcagggaccttattagcagcggtgttactatccagatcatgacggagcaagagtctggctactgctggaggaattttgtcaactactccccttcgaatgaagctcattggccaaggtacccccatctgtgggtgaggctgtacgtactggaactctactgcatcattttaggacttccaccctgtttaaatattttaagaagaaaacaacctcaactcacgtttttcacgattgctcttcaaagctgccattaccaaaggctaccaccccacatcctgtgggccacagggttgaaaccagctccagctccaatggacaagaagtactccattgggctcgctatcggcacaaacagcgtcggttgggccgtcattacggacgagtacaaggtgccgagcaaaaaattcaaagttctgggcaataccgatcgccacagcataaagaagaacctcattggcgccctcctgttcgactccggggagacggccgaagccacgcggctcaaaagaacagcacggcgcagatatacccgcagaaagaatcggatctgctacctgcaggagatctttagtaatgagatggctaaggtggatgactctttcttccataggctggaggagtcctttttggtggaggaggataaaaagcacgagcgccacccaatctttggcaatatcgtggacgaggtggcgtaccatgaaaagtacccaaccatatatcatctgaggaagaagcttgtagacagtactgataaggctgacttgcggttgatctatctcgcgctggcgcatatgatcaaatttcggggacacttcctcatcgagggggacctgaacccagacaacagcgatgtcgacaaactctttatccaactggttcagacttacaatcagcttttcgaagagaacccgatcaacgcatccggagttgacgccaaagcaatcctgagcgctaggctgtccaaatcccggcggctcgaaaacctcatcgcacagctccctggggagaagaagaacggcctgtttggtaatcttatcgccctgtcactcgggctgacccccaactttaaatctaacttcgacctggccgaagatgccaagcttcaactgagcaaagacacctacgatgatgatctcgacaatctgctggcccagatcggcgaccagtacgcagacctttttttggcggcaaagaacctgtcagacgccattctgctgagtgatattctgcgagtgaacacggagatcaccaaagctccgctgagcgctagtatgatcaagcgctatgatgagcaccaccaagacttgactttgctgaaggcccttgtcagacagcaactgcctgagaagtacaaggaaattttcttcgatcagtctaaaaatggctacgccggatacattgacggcggagcaagccaggaggaattttacaaatttattaagcccatcttggaaaaaatggacggcaccgaggagctgctggtaaagcttaacagagaagatctgttgcgcaaacagcgcactttcgacaatggaagcatcccccaccagattcacctgggcgaactgcacgctatcctcaggcggcaagaggatttctacccctttttgaaagataacagggaaaagattgagaaaatcctcacatttcggataccctactatgtaggccccctcgcccggggaaattccagattcgcgtggatgactcgcaaatcagaagagaccatcactccctggaacttcgaggaagtcgtggataagggggcctctgcccagtccttcatcgaaaggatgactaactttgataaaaatctgcctaacgaaaaggtgcttcctaaacactctctgctgtacgagtacttcacagtttataacgagctcaccaaggtcaaatacgtcacagaagggatgagaaagccagcattcctgtctggagagcagaagaaagctatcgtggacctcctcttcaagacgaaccggaaagttaccgtgaaacagctcaaagaagactatttcaaaaagattgaatgtttcgactctgttgaaatcagcggagtggaggatcgcttcaacgcatccctgggaacgtatcacgatctcctgaaaatcattaaagacaaggacttcctggacaatgaggagaacgaggacattcttgaggacattgtcctcacccttacgttgtttgaagatagggagatgattgaagaacgcttgaaaacttacgctcatctcttcgacgacaaagtcatgaaacagctcaagaggcgccgatatacaggatgggggcggctgtcaagaaaactgatcaatgggatccgagacaagcagagtggaaagacaatcctggattttcttaagtccgatggatttgccaaccggaacttcatgcagttgatccatgatgactctctcacctttaaggaggacatccagaaagcacaagtttctggccagggggacagtcttcacgagcacatcgctaatcttgcaggtagcccagctatcaaaaagggaatactgcagaccgttaaggtcgtggatgaactcgtcaaagtaatgggaaggcataagcccgagaatatcgttatcgagatggcccgagagaaccaaactacccagaagggacagaagaacagtagggaaaggatgaagaggattgaagagggtataaaagaactggggtcccaaatccttaaggaacacccagttgaaaacacccagcttcagaatgagaagctctacctgtactacctgcagaacggcagggacatgtacgtggatcaggaactggacatcaatcggctctccgactacgacgtggatcatatcgtgccccagtcttttctcaaagatgattctattgataataaagtgttgacaagatccgataaaaatagagggaagagtgataacgtcccctcagaagaagttgtcaagaaaatgaaaaattattggcggcagctgctgaacgccaaactgatcacacaacggaagttcgataatctgactaaggctgaacgaggtggcctgtctgagttggataaagccggcttcatcaaaaggcagcttgttgagacacgccagatcaccaagcacgtggcccaaattctcgattcacgcatgaacaccaagtacgatgaaaatgacaaactgattcgagaggtgaaagttattactctgaagtctaagctggtctcagatttcagaaaggactttcagttttataaggtgagagagatcaacaattaccaccatgcgcatgatgcctacctgaatgcagtggtaggcactgcacttatcaaaaaatatcccaagcttgaatctgaatttgtttacggagactataaagtgtacgatgttaggaaaatgatcgcaaagtctgagcaggaaataggcaaggccaccgctaagtacttcttttacagcaatattatgaattttttcaagaccgagattacactggccaatggagagattcggaagcgaccacttatcgaaacaaacggagaaacaggagaaatcgtgtgggacaagggtagggatttcgcgacagtccggaaggtcctgtccatgccgcaggtgaacatcgttaaaaagaccgaagtacagaccggaggcttctccaaggaaagtatcctcccgaaaaggaacagcgacaagctgatcgcacgcaaaaaagattgggaccccaagaaatacggcggattcgattctcctacagtcgcttacagtgtactggttgtggccaaagtggagaaagggaagtctaaaaaactcaaaagcgtcaaggaactgctgggcatcacaatcatggagcgatcaagcttcgaaaaaaaccccatcgactttctcgaggcgaaaggatataaagaggtcaaaaaagacctcatcattaagcttcccaagtactctctctttgagcttgaaaacggccggaaacgaatgctcgctagtgcgggcgagctgcagaaaggtaacgagctggcactgccctctaaatacgttaatttcttgtatctggccagccactatgaaaagctcaaagggtctcccgaagataatgagcagaagcagctgttcgtggaacaacacaaacactaccttgatgagatcatcgagcaaataagcgaattctccaaaagagtgatcctcgccgacgctaacctcgataaggtgctttctgcttacaataagcacagggataagcccatcagggagcaggcagaaaacattatccacttgtttactctgaccaacttgggcgcgcctgcagccttcaagtacttcgacaccaccatagacagaaagcggtacacctctacaaaggaggtcctggacgccacactgattcatcagtcaattacggggctctatgaaacaagaatcgacctctctcagctcggtggagactctggtggttcaactaatttatctgatattattgaaaaagaaacaggtaaacaattagttattcaagaatcaattttaatgttgccagaagaagttgaagaagttattggtaataaaccagaatctgatattttagttcatactgcttatgatgaatctactgatgaaaatgttatgttattgacttcagatgctccagaatataaaccatgggctttagttattcaagattctaatggtgaaaataaaattaaaatgttgtctggtggttcacccaagaagaagaggaaggtg

SEQ ID NO: 39 - DNA, 687 bp, Artificial Sequence; identical to SEQ ID NO: 27
  Deaminase APOBEC1

SEQ ID NO: 40 - DNA, 15 bp, Artificial Sequence
  PAPAP linker
ccagctccagctcca

SEQ ID NO: 41 - DNA, 4104 bp, Artificial Sequence; identical to SEQ ID NO: 22
  nCas9

SEQ ID NO: 42 - DNA, 12 bp, Artificial Sequence
  SGGS linker
tctggtggttca

SEQ ID NO: 43 - DNA, 249 bp, Artificial Sequence; identical to SEQ ID NO: 35
  UGI

SEQ ID NO: 44 - DNA, 12 bp, Artificial Sequence
  SGGS linker
tctggtggttca

SEQ ID NO: 45 - DNA, 21 bp, Artificial Sequence
  NLS
cccaagaagaagaggaaggtg

SEQ ID NO: 46 - DNA, 5106 bp, Artificial Sequence
  BE-PAPAPAP
atgagttccgagacaggccctgtagctgttgatcccactctgaggagaagaattgagccccacgagtttgaagtcttctttgacccccgggaacttcggaaagagacctgtctgctgtatgagatcaactggggaggaaggcacagcatctggcgacacacgagccaaaacaccaacaaacacgttgaagtcaatttcatagaaaaatttactacagaaagatacttttgtccaaacaccagatgctccattacctggttcctgtcctggagtccctgtggggagtgctccagggccattacagaatttttgagccgatacccccatgtaactctgtttatttatatagcacggctttatcaccacgcagatcctcgaaatcggcaaggactcagggaccttattagcagcggtgttactatccagatcatgacggagcaagagtctggctactgctggaggaattttgtcaactactccccttcgaatgaagctcattggccaaggtacccccatctgtgggtgaggctgtacgtactggaactctactgcatcattttaggacttccaccctgtttaaatattttaagaagaaaacaacctcaactcacgtttttcacgattgctcttcaaagctgccattaccaaaggctaccaccccacatcctgtgggccacagggttgaaaccagctccagcaccagcccctatggacaagaagtactccattgggctcgctatcggcacaaacagcgtcggttgggccgtcattacggacgagtacaaggtgccgagcaaaaaattcaaagttctgggcaataccgatcgccacagcataaagaagaacctcattggcgccctcctgttcgactccggggagacggccgaagccacgcggctcaaaagaacagcacggcgcagatatacccgcagaaagaatcggatctgctacctgcaggagatctttagtaatgagatggctaaggtggatgactctttcttccataggctggaggagtcctttttggtggaggaggataaaaagcacgagcgccacccaatctttggcaatatcgtggacgaggtggcgtaccatgaaaagtacccaaccatatatcatctgaggaagaagcttgtagacagtactgataaggctgacttgcggttgatctatctcgcgctggcgcatatgatcaaatttcggggacacttcctcatcgagggggacctgaacccagacaacagcgatgtcgacaaactctttatccaactggttcagacttacaatcagcttttcgaagagaacccgatcaacgcatccggagttgacgccaaagcaatcctgagcgctaggctgtccaaatcccggcggctcgaaaacctcatcgcacagctccctggggagaagaagaacggcctgtttggtaatcttatcgccctgtcactcgggctgacccccaactttaaatctaacttcgacctggccgaagatgccaagcttcaactgagcaaagacacctacgatgatgatctcgacaatctgctggcccagatcggcgaccagtacgcagacctttttttggcggcaaagaacctgtcagacgccattctgctgagtgatattctgcgagtgaacacggagatcaccaaagctccgctgagcgctagtatgatcaagcgctatgatgagcaccaccaagacttgactttgctgaaggcccttgtcagacagcaactgcctgagaagtacaaggaaattttcttcgatcagtctaaaaatggctacgccggatacattgacggcggagcaagccaggaggaattttacaaatttattaagcccatcttggaaaaaatggacggcaccgaggagctgctggtaaagcttaacagagaagatctgttgcgcaaacagcgcactttcgacaatggaagcatcccccaccagattcacctgggcgaactgcacgctatcctcaggcggcaagaggatttctacccctttttgaaagataacagggaaaagattgagaaaatcctcacatttcggataccctactatgtaggccccctcgcccggggaaattccagattcgcgtggatgactcgcaaatcagaagagaccatcactccctggaacttcgaggaagtcgtggataagggggcctctgcccagtccttcatcgaaaggatgactaactttgataaaaatctgcctaacgaaaaggtgcttcctaaacactctctgctgtacgagtacttcacagtttataacgagctcaccaaggtcaaatacgtcacagaagggatgagaaagccagcattcctgtctggagagcagaagaaagctatcgtggacctcctcttcaagacgaaccggaaagttaccgtgaaacagctcaaagaagactatttcaaaaagattgaatgtttcgactctgttgaaatcagcggagtggaggatcgcttcaacgcatccctgggaacgtatcacgatctcctgaaaatcattaaagacaaggacttcctggacaatgaggagaacgaggacattcttgaggacattgtcctcacccttacgttgtttgaagatagggagatgattgaagaacgcttgaaaacttacgctcatctcttcgacgacaaagtcatgaaacagctcaagaggcgccgatatacaggatgggggcggctgtcaagaaaactgatcaatgggatccgagacaagcagagtggaaagacaatcctggattttcttaagtccgatggatttgccaaccggaacttcatgcagttgatccatgatgactctctcacctttaaggaggacatccagaaagcacaagtttctggccagggggacagtcttcacgagcacatcgctaatcttgcaggtagcccagctatcaaaaagggaatactgcagaccgttaaggtcgtggatgaactcgtcaaagtaatgggaaggcataagcccgagaatatcgttatcgagatggcccgagagaaccaaactacccagaagggacagaagaacagtagggaaaggatgaagaggattgaagagggtataaaagaactggggtcccaaatccttaaggaacacccagttgaaaacacccagcttcagaatgagaagctctacctgtactacctgcagaacggcagggacatgtacgtggatcaggaactggacatcaatcggctctccgactacgacgtggatcatatcgtgccccagtcttttctcaaagatgattctattgataataaagtgttgacaagatccgataaaaatagagggaagagtgataacgtcccctcagaagaagttgtcaagaaaatgaaaaattattggcggcagctgctgaacgccaaactgatcacacaacggaagttcgataatctgactaaggctgaacgaggtggcctgtctgagttggataaagccggcttcatcaaaaggcagcttgttgagacacgccagatcaccaagcacgtggcccaaattctcgattcacgcatgaacaccaagtacgatgaaaatgacaaactgattcgagaggtgaaagttattactctgaagtctaagctggtctcagatttcagaaaggactttcagttttataaggtgagagagatcaacaattaccaccatgcgcatgatgcctacctgaatgcagtggtaggcactgcacttatcaaaaaatatcccaagcttgaatctgaatttgtttacggagactataaagtgtacgatgttaggaaaatgatcgcaaagtctgagcaggaaataggcaaggccaccgctaagtacttcttttacagcaatattatgaattttttcaagaccgagattacactggccaatggagagattcggaagcgaccacttatcgaaacaaacggagaaacaggagaaatcgtgtgggacaagggtagggatttcgcgacagtccggaaggtcctgtccatgccgcaggtgaacatcgttaaaaagaccgaagtacagaccggaggcttctccaaggaaagtatcctcccgaaaaggaacagcgacaagctgatcgcacgcaaaaaagattgggaccccaagaaatacggcggattcgattctcctacagtcgcttacagtgtactggttgtggccaaagtggagaaagggaagtctaaaaaactcaaaagcgtcaaggaactgctgggcatcacaatcatggagcgatcaagcttcgaaaaaaaccccatcgactttctcgaggcgaaaggatataaagaggtcaaaaaagacctcatcattaagcttcccaagtactctctctttgagcttgaaaacggccggaaacgaatgctcgctagtgcgggcgagctgcagaaaggtaacgagctggcactgccctctaaatacgttaatttcttgtatctggccagccactatgaaaagctcaaagggtctcccgaagataatgagcagaagcagctgttcgtggaacaacacaaacactaccttgatgagatcatcgagcaaataagcgaattctccaaaagagtgatcctcgccgacgctaacctcgataaggtgctttctgcttacaataagcacagggataagcccatcagggagcaggcagaaaacattatccacttgtttactctgaccaacttgggcgcgcctgcagccttcaagtacttcgacaccaccatagacagaaagcggtacacctctacaaaggaggtcctggacgccacactgattcatcagtcaattacggggctctatgaaacaagaatcgacctctctcagctcggtggagactctggtggttcaactaatttatctgatattattgaaaaagaaacaggtaaacaattagttattcaagaatcaattttaatgttgccagaagaagttgaagaagttattggtaataaaccagaatctgatattttagttcatactgcttatgatgaatctactgatgaaaatgttatgttattgacttcagatgctccagaatataaaccatgggctttagttattcaagattctaatggtgaaaataaaattaaaatgttgtctggtggttcacccaagaagaagaggaaggtg

SEQ ID NO: 47 - DNA, 687 bp, Artificial Sequence; identical to SEQ ID NO: 27
  Deaminase APOBEC1

SEQ ID NO: 48 - DNA, 21 bp, Artificial Sequence
  PAPAPAP linker
ccagctccagcaccagcccct

SEQ ID NO: 49 - DNA, 4104 bp, Artificial Sequence; identical to SEQ ID NO: 22
  nCas9

SEQ ID NO: 50 - DNA, 12 bp, Artificial Sequence
  SGGS linker
tctggtggttca

SEQ ID NO: 51 - DNA, 249 bp, Artificial Sequence; identical to SEQ ID NO: 35
  UGI

SEQ ID NO: 52 - DNA, 12 bp, Artificial Sequence
  SGGS linker
tctggtggttca

SEQ ID NO: 53 - DNA, 21 bp, Artificial Sequence
  NLS
cccaagaagaagaggaaggtg

SEQ ID NO: 54 - DNA, 5070 bp, Artificial Sequence
  nCDA1-BE3
atgaccgacgctgagtacgtgagaatccatgagaagttggacatctacacgtttaagaaacagtttttcaacaacaaaaaatccgtgtcgcatagatgctacgttctctttgaattaaaacgacggggtgaacgtagagcgtgtttttggggctatgctgtgaataaaccacagagcgggacagaacgtggcattcacgccgaaatctttagcattagaaaagtcgaagaatacctgcgcgacaaccccggacaattcacgataaattggtactcatcctggagtccttgtgcagattgcgctgaaaagatcttagaatggtataaccaggagctgcgggggaacggccacactttgaaaatctgggcttgcaaactctattacgagaaaaatgcgaggaatcaaattgggctgtggaacctcagagataacggggttgggttgaatgtaatggtaagtgaacactaccaatgttgcaggaaaatattcatccaatcgtcgcacaatcaattgaatgagaatagatggcttgagaagactttgaagcgagctgaaaaacgacggagcgagttgtccattatgattcaggtaaaaatactccacaccactaagagtcctgctgtttctggttctgaaactccaggtacttctgaatctgctactccagaatctatggacaagaagtactccattgggctcgctatcggcacaaacagcgtcggttgggccgtcattacggacgagtacaaggtgccgagcaaaaaattcaaagttctgggcaataccgatcgccacagcataaagaagaacctcattggcgccctcctgttcgactccggggagacggccgaagccacgcggctcaaaagaacagcacggcgcagatatacccgcagaaagaatcggatctgctacctgcaggagatctttagtaatgagatggctaaggtggatgactctttcttccataggctggaggagtcctttttggtggaggaggataaaaagcacgagcgccacccaatctttggcaatatcgtggacgaggtggcgtaccatgaaaagtacccaaccatatatcatctgaggaagaagcttgtagacagtactgataaggctgacttgcggttgatctatctcgcgctggcgcatatgatcaaatttcggggacacttcctcatcgagggggacctgaacccagacaacagcgatgtcgacaaactctttatccaactggttcagacttacaatcagcttttcgaagagaacccgatcaacgcatccggagttgacgccaaagcaatcctgagcgctaggctgtccaaatcccggcggctcgaaaacctcatcgcacagctccctggggagaagaagaacggcctgtttggtaatcttatcgccctgtcactcgggctgacccccaactttaaatctaacttcgacctggccgaagatgccaagcttcaactgagcaaagacacctacgatgatgatctcgacaatctgctggcccagatcggcgaccagtacgcagacctttttttggcggcaaagaacctgtcagacgccattctgctgagtgatattctgcgagtgaacacggagatcaccaaagctccgctgagcgctagtatgatcaagcgctatgatgagcaccaccaagacttgactttgctgaaggcccttgtcagacagcaactgcctgagaagtacaaggaaattttcttcgatcagtctaaaaatggctacgccggatacattgacggcggagcaagccaggaggaattttacaaatttattaagcccatcttggaaaaaatggacggcaccgaggagctgctggtaaagcttaacagagaagatctgttgcgcaaacagcgcactttcgacaatggaagcatcccccaccagattcacctgggcgaactgcacgctatcctcaggcggcaagaggatttctacccctttttgaaagataacagggaaaagattgagaaaatcctcacatttcggataccctactatgtaggccccctcgcccggggaaattccagattcgcgtggatgactcgcaaatcagaagagaccatcactccctggaacttcgaggaagtcgtggataagggggcctctgcccagtccttcatcgaaaggatgactaactttgataaaaatctgcctaacgaaaaggtgcttcctaaacactctctgctgtacgagtacttcacagtttataacgagctcaccaaggtcaaatacgtcacagaagggatgagaaagccagcattcctgtctggagagcagaagaaagctatcgtggacctcctcttcaagacgaaccggaaagttaccgtgaaacagctcaaagaagactatttcaaaaagattgaatgtttcgactctgttgaaatcagcggagtggaggatcgcttcaacgcatccctgggaacgtatcacgatctcctgaaaatcattaaagacaaggacttcctggacaatgaggagaacgaggacattcttgaggacattgtcctcacccttacgttgtttgaagatagggagatgattgaagaacgcttgaaaacttacgctcatctcttcgacgacaaagtcatgaaacagctcaagaggcgccgatatacaggatgggggcggctgtcaagaaaactgatcaatgggatccgagacaagcagagtggaaagacaatcctggattttcttaagtccgatggatttgccaaccggaacttcatgcagttgatccatgatgactctctcacctttaaggaggacatccagaaagcacaagtttctggccagggggacagtcttcacgagcacatcgctaatcttgcaggtagcccagctatcaaaaagggaatactgcagaccgttaaggtcgtggatgaactcgtcaaagtaatgggaaggcataagcccgagaatatcgttatcgagatggcccgagagaaccaaactacccagaagggacagaagaacagtagggaaaggatgaagaggattgaagagggtataaaagaactggggtcccaaatccttaaggaacacccagttgaaaacacccagcttcagaatgagaagctctacctgtactacctgcagaacggcagggacatgtacgtggatcaggaactggacatcaatcggctctccgactacgacgtggatcatatcgtgccccagtcttttctcaaagatgattctattgataataaagtgttgacaagatccgataaaaatagagggaagagtgataacgtcccctcagaagaagttgtcaagaaaatgaaaaattattggcggcagctgctgaacgccaaactgatcacacaacggaagttcgataatctgactaaggctgaacgaggtggcctgtctgagttggataaagccggcttcatcaaaaggcagcttgttgagacacgccagatcaccaagcacgtggcccaaattctcgattcacgcatgaacaccaagtacgatgaaaatgacaaactgattcgagaggtgaaagttattactctgaagtctaagctggtctcagatttcagaaaggactttcagttttataaggtgagagagatcaacaattaccaccatgcgcatgatgcctacctgaatgcagtggtaggcactgcacttatcaaaaaatatcccaagcttgaatctgaatttgtttacggagactataaagtgtacgatgttaggaaaatgatcgcaaagtctgagcaggaaataggcaaggccaccgctaagtacttcttttacagcaatattatgaattttttcaagaccgagattacactggccaatggagagattcggaagcgaccacttatcgaaacaaacggagaaacaggagaaatcgtgtgggacaagggtagggatttcgcgacagtccggaaggtcctgtccatgccgcaggtgaacatcgttaaaaagaccgaagtacagaccggaggcttctccaaggaaagtatcctcccgaaaaggaacagcgacaagctgatcgcacgcaaaaaagattgggaccccaagaaatacggcggattcgattctcctacagtcgcttacagtgtactggttgtggccaaagtggagaaagggaagtctaaaaaactcaaaagcgtcaaggaactgctgggcatcacaatcatggagcgatcaagcttcgaaaaaaaccccatcgactttctcgaggcgaaaggatataaagaggtcaaaaaagacctcatcattaagcttcccaagtactctctctttgagcttgaaaacggccggaaacgaatgctcgctagtgcgggcgagctgcagaaaggtaacgagctggcactgccctctaaatacgttaatttcttgtatctggccagccactatgaaaagctcaaagggtctcccgaagataatgagcagaagcagctgttcgtggaacaacacaaacactaccttgatgagatcatcgagcaaataagcgaattctccaaaagagtgatcctcgccgacgctaacctcgataaggtgctttctgcttacaataagcacagggataagcccatcagggagcaggcagaaaacattatccacttgtttactctgaccaacttgggcgcgcctgcagccttcaagtacttcgacaccaccatagacagaaagcggtacacctctacaaaggaggtcctggacgccacactgattcatcagtcaattacggggctctatgaaacaagaatcgacctctctcagctcggtggagactctggtggttcaactaatttatctgatattattgaaaaagaaacaggtaaacaattagttattcaagaatcaattttaatgttgccagaagaagttgaagaagttattggtaataaaccagaatctgatattttagttcatactgcttatgatgaatctactgatgaaaatgttatgttattgacttcagatgctccagaatataaaccatgggctttagttattcaagattctaatggtgaaaataaaattaaaatgttgtctggtggttcacccaagaagaagaggaaggtg

SEQ ID NO: 55 - DNA, 624 bp, Artificial Sequence
  Deaminase CDA1
atgaccgacgctgagtacgtgagaatccatgagaagttggacatctacacgtttaagaaacagtttttcaacaacaaaaaatccgtgtcgcatagatgctacgttctctttgaattaaaacgacggggtgaacgtagagcgtgtttttggggctatgctgtgaataaaccacagagcgggacagaacgtggcattcacgccgaaatctttagcattagaaaagtcgaagaatacctgcgcgacaaccccggacaattcacgataaattggtactcatcctggagtccttgtgcagattgcgctgaaaagatcttagaatggtataaccaggagctgcgggggaacggccacactttgaaaatctgggcttgcaaactctattacgagaaaaatgcgaggaatcaaattgggctgtggaacctcagagataacggggttgggttgaatgtaatggtaagtgaacactaccaatgttgcaggaaaatattcatccaatcgtcgcacaatcaattgaatgagaatagatggcttgagaagactttgaagcgagctgaaaaacgacggagcgagttgtccattatgattcaggtaaaaatactccacaccactaagagtcctgctgtt

SEQ ID NO: 56 - DNA, 48 bp, Artificial Sequence; identical to SEQ ID NO: 32
  XTEN linker

SEQ ID NO: 57 - DNA, 4104 bp, Artificial Sequence; identical to SEQ ID NO: 22
  nCas9

SEQ ID NO: 58 - DNA, 12 bp, Artificial Sequence
  SGGS linker
tctggtggttca

SEQ ID NO: 59 - DNA, 249 bp, Artificial Sequence; identical to SEQ ID NO: 35
  UGI

SEQ ID NO: 60 - DNA, 12 bp, Artificial Sequence
  SGGS linker
tctggtggttca

SEQ ID NO: 61 - DNA, 21 bp, Artificial Sequence
  NLS
cccaagaagaagaggaaggtg

SEQ ID NO: 62 - DNA, 5076 bp, Artificial Sequence
  cCDA1-BE3
atggacaagaagtactccattgggctcgctatcggcacaaacagcgtcggttgggccgtcattacggacgagtacaaggtgccgagcaaaaaattcaaagttctgggcaataccgatcgccacagcataaagaagaacctcattggcgccctcctgttcgactccggggagacggccgaagccacgcggctcaaaagaacagcacggcgcagatatacccgcagaaagaatcggatctgctacctgcaggagatctttagtaatgagatggctaaggtggatgactctttcttccataggctggaggagtcctttttggtggaggaggataaaaagcacgagcgccacccaatctttggcaatatcgtggacgaggtggcgtaccatgaaaagtacccaaccatatatcatctgaggaagaagcttgtagacagtactgataaggctgacttgcggttgatctatctcgcgctggcgcatatgatcaaatttcggggacacttcctcatcgagggggacctgaacccagacaacagcgatgtcgacaaactctttatccaactggttcagacttacaatcagcttttcgaagagaacccgatcaacgcatccggagttgacgccaaagcaatcctgagcgctaggctgtccaaatcccggcggctcgaaaacctcatcgcacagctccctggggagaagaagaacggcctgtttggtaatcttatcgccctgtcactcgggctgacccccaactttaaatctaacttcgacctggccgaagatgccaagcttcaactgagcaaagacacctacgatgatgatctcgacaatctgctggcccagatcggcgaccagtacgcagacctttttttggcggcaaagaacctgtcagacgccattctgctgagtgatattctgcgagtgaacacggagatcaccaaagctccgctgagcgctagtatgatcaagcgctatgatgagcaccaccaagacttgactttgctgaaggcccttgtcagacagcaactgcctgagaagtacaaggaaattttcttcgatcagtctaaaaatggctacgccggatacattgacggcggagcaagccaggaggaattttacaaatttattaagcccatcttggaaaaaatggacggcaccgaggagctgctggtaaagcttaacagagaagatctgttgcgcaaacagcgcactttcgacaatggaagcatcccccaccagattcacctgggcgaactgcacgctatcctcaggcggcaagaggatttctacccctttttgaaagataacagggaaaagattgagaaaatcctcacatttcggataccctactatgtaggccccctcgcccggggaaattccagattcgcgtggatgactcgcaaatcagaagagaccatcactccctggaacttcgaggaagtcgtggataagggggcctctgcccagtccttcatcgaaaggatgactaactttgataaaaatctgcctaacgaaaaggtgcttcctaaacactctctgctgtacgagtacttcacagtttataacgagctcaccaaggtcaaatacgtcacagaagggatgagaaagccagcattcctgtctggagagcagaagaaagctatcgtggacctcctcttcaagacgaaccggaaagttaccgtgaaacagctcaaagaagactatttcaaaaagattgaatgtttcgactctgttgaaatcagcggagtggaggatcgcttcaacgcatccctgggaacgtatcacgatctcctgaaaatcattaaagacaaggacttcctggacaatgaggagaacgaggacattcttgaggacattgtcctcacccttacgttgtttgaagatagggagatgattgaagaacgcttgaaaacttacgctcatctcttcgacgacaaagtcatgaaacagctcaagaggcgccgatatacaggatgggggcggctgtcaagaaaactgatcaatgggatccgagacaagcagagtggaaagacaatcctggattttcttaagtccgatggatttgccaaccggaacttcatgcagttgatccatgatgactctctcacctttaaggaggacatccagaaagcacaagtttctggccagggggacagtcttcacgagcacatcgctaatcttgcaggtagcccagctatcaaaaagggaatactgcagaccgttaaggtcgtggatgaactcgtcaaagtaatgggaaggcataagcccgagaatatcgttatcgagatggcccgagagaaccaaactacccagaagggacagaagaacagtagggaaaggatgaagaggattgaagagggtataaaagaactggggtcccaaatccttaaggaacacccagttgaaaacacccagcttcagaatgagaagctctacctgtactacctgcagaacggcagggacatgtacgtggatcaggaactggacatcaatcggctctccgactacgacgtggatcatatcgtgccccagtcttttctcaaagatgattctattgataataaagtgttgacaagatccgataaaaatagagggaagagtgataacgtcccctcagaagaagttgtcaagaaaatgaaaaattattggcggcagctgctgaacgccaaactgatcacacaacggaagttcgataatctgactaaggctgaacgaggtggcctgtctgagttggataaagccggcttcatcaaaaggcagcttgttgagacacgccagatcaccaagcacgtggcccaaattctcgattcacgcatgaacaccaagtacgatgaaaatgacaaactgattcgagaggtgaaagttattactctgaagtctaagctggtctcagatttcagaaaggactttcagttttataaggtgagagagatcaacaattaccaccatgcgcatgatgcctacctgaatgcagtggtaggcactgcacttatcaaaaaatatcccaagcttgaatctgaatttgtttacggagactataaagtgtacgatgttaggaaaatgatcgcaaagtctgagcaggaaataggcaaggccaccgctaagtacttcttttacagcaatattatgaattttttcaagaccgagattacactggccaatggagagattcggaagcgaccacttatcgaaacaaacggagaaacaggagaaatcgtgtgggacaagggtagggatttcgcgacagtccggaaggtcctgtccatgccgcaggtgaacatcgttaaaaagaccgaagtacagaccggaggcttctccaaggaaagtatcctcccgaaaaggaacagcgacaagctgatcgcacgcaaaaaagattgggaccccaagaaatacggcggattcgattctcctacagtcgcttacagtgtactggttgtggccaaagtggagaaagggaagtctaaaaaactcaaaagcgtcaaggaactgctgggcatcacaatcatggagcgatcaagcttcgaaaaaaaccccatcgactttctcgaggcgaaaggatataaagaggtcaaaaaagacctcatcattaagcttcccaagtactctctctttgagcttgaaaacggccggaaacgaatgctcgctagtgcgggcgagctgcagaaaggtaacgagctggcactgccctctaaatacgttaatttcttgtatctggccagccactatgaaaagctcaaagggtctcccgaagataatgagcagaagcagctgttcgtggaacaacacaaacactaccttgatgagatcatcgagcaaataagcgaattctccaaaagagtgatcctcgccgacgctaacctcgataaggtgctttctgcttacaataagcacagggataagcccatcagggagcaggcagaaaacattatccacttgtttactctgaccaacttgggcgcgcctgcagccttcaagtacttcgacaccaccatagacagaaagcggtacacctctacaaaggaggtcctggacgccacactgattcatcagtcaattacggggctctatgaaacaagaatcgacctctctcagctcggtggagactctggttctgaaactccaggtacttctgaatctgctactccagaatctatgaccgacgctgagtacgtgagaatccatgagaagttggacatctacacgtttaagaaacagtttttcaacaacaaaaaatccgtgtcgcatagatgctacgttctctttgaattaaaacgacggggtgaacgtagagcgtgtttttggggctatgctgtgaataaaccacagagcgggacagaacgtggcattcacgccgaaatctttagcattagaaaagtcgaagaatacctgcgcgacaaccccggacaattcacgataaattggtactcatcctggagtccttgtgcagattgcgctgaaaagatcttagaatggtataaccaggagctgcgggggaacggccacactttgaaaatctgggcttgcaaactctattacgagaaaaatgcgaggaatcaaattgggctgtggaacctcagagataacggggttgggttgaatgtaatggtaagtgaacactaccaatgttgcaggaaaatattcatccaatcgtcgcacaatcaattgaatgagaatagatggcttgagaagactttgaagcgagctgaaaaacgacggagcgagttgtccattatgattcaggtaaaaatactccacaccactaagagtcctgctgtttctagatctggtggttcaactaatttatctgatattattgaaaaagaaacaggtaaacaattagttattcaagaatcaattttaatgttgccagaagaagttgaagaagttattggtaataaaccagaatctgatattttagttcatactgcttatgatgaatctactgatgaaaatgttatgttattgacttcagatgctccagaatataaaccatgggctttagttattcaagattctaatggtgaaaataaaattaaaatgttgtctggtggttcacccaagaagaagaggaaggtg

SEQ ID NO: 63 - DNA, 4104 bp, Artificial Sequence; identical to SEQ ID NO: 22
  nCas9

SEQ ID NO: 64 - DNA, 48 bp, Artificial Sequence; identical to SEQ ID NO: 32
  XTEN linker

SEQ ID NO: 65 - DNA, 624 bp, Artificial Sequence; identical to SEQ ID NO: 55
  Deaminase CDA1

SEQ ID NO: 66 - DNA, 18 bp, Artificial Sequence
  SRSGGS linker
tctagatctggtggttca

SEQ ID NO: 67 - DNA, 249 bp, Artificial Sequence; identical to SEQ ID NO: 35
  UGI

SEQ ID NO: 68 - DNA, 12 bp, Artificial Sequence
  SGGS linker
tctggtggttca

SEQ ID NO: 69 - DNA, 21 bp, Artificial Sequence
  NLS
cccaagaagaagaggaaggtg

SEQ ID NO: 70 - DNA, 4980 bp, Artificial Sequence
  nCDA1Δ194-BE3
atgaccgacgctgagtacgtgagaatccatgagaagttggacatctacacgtttaagaaacagtttttcaacaacaaaaaatccgtgtcgcatagatgctacgttctctttgaattaaaacgacggggtgaacgtagagcgtgtttttggggctatgctgtgaataaaccacagagcgggacagaacgtggcattcacgccgaaatctttagcattagaaaagtcgaagaatacctgcgcgacaaccccggacaattcacgataaattggtactcatcctggagtccttgtgcagattgcgctgaaaagatcttagaatggtataaccaggagctgcgggggaacggccacactttgaaaatctgggcttgcaaactctattacgagaaaaatgcgaggaatcaaattgggctgtggaacctcagagataacggggttgggttgaatgtaatggtaagtgaacactaccaatgttgcaggaaaatattcatccaatcgtcgcacaatcaattgaatgagaatagatggcttgagaagactttgaagcgagctgaaaaacgacggagcgagttgtccattatgatggacaagaagtactccattgggctcgctatcggcacaaacagcgtcggttgggccgtcattacggacgagtacaaggtgccgagcaaaaaattcaaagttctgggcaataccgatcgccacagcataaagaagaacctcattggcgccctcctgttcgactccggggagacggccgaagccacgcggctcaaaagaacagcacggcgcagatatacccgcagaaagaatcggatctgctacctgcaggagatctttagtaatgagatggctaaggtggatgactctttcttccataggctggaggagtcctttttggtggaggaggataaaaagcacgagcgccacccaatctttggcaatatcgtggacgaggtggcgtaccatgaaaagtacccaaccatatatcatctgaggaagaagcttgtagacagtactgataaggctgacttgcggttgatctatctcgcgctggcgcatatgatcaaatttcggggacacttcctcatcgagggggacctgaacccagacaacagcgatgtcgacaaactctttatccaactggttcagacttacaatcagcttttcgaagagaacccgatcaacgcatccggagttgacgccaaagcaatcctgagcgctaggctgtccaaatcccggcggctcgaaaacctcatcgcacagctccctggggagaagaagaacggcctgtttggtaatcttatcgccctgtcactcgggctgacccccaactttaaatctaacttcgacctggccgaagatgccaagcttcaactgagcaaagacacctacgatgatgatctcgacaatctgctggcccagatcggcgaccagtacgcagacctttttttggcggcaaagaacctgtcagacgccattctgctgagtgatattctgcgagtgaacacggagatcaccaaagctccgctgagcgctagtatgatcaagcgctatgatgagcaccaccaagacttgactttgctgaaggcccttgtcagacagcaactgcctgagaagtacaaggaaattttcttcgatcagtctaaaaatggctacgccggatacattgacggcggagcaagccaggaggaattttacaaatttattaagcccatcttggaaaaaatggacggcaccgaggagctgctggtaaagcttaacagagaagatctgttgcgcaaacagcgcactttcgacaatggaagcatcccccaccagattcacctgggcgaactgcacgctatcctcaggcggcaagaggatttctacccctttttgaaagataacagggaaaagattgagaaaatcctcacatttcggataccctactatgtaggccccctcgcccggggaaattccagattcgcgtggatgactcgcaaatcagaagagaccatcactccctggaacttcgaggaagtcgtggataagggggcctctgcccagtccttcatcgaaaggatgactaactttgataaaaatctgcctaacgaaaaggtgcttcctaaacactctctgctgtacgagtacttcacagtttataacgagctcaccaaggtcaaatacgtcacagaagggatgagaaagccagcattcctgtctggagagcagaagaaagctatcgtggacctcctcttcaagacgaaccggaaagttaccgtgaaacagctcaaagaagactatttcaaaaagattgaatgtttcgactctgttgaaatcagcggagtggaggatcgcttcaacgcatccctgggaacgtatcacgatctcctgaaaatcattaaagacaaggacttcctggacaatgaggagaacgaggacattcttgaggacattgtcctcacccttacgttgtttgaagatagggagatgattgaagaacgcttgaaaacttacgctcatctcttcgacgacaaagtcatgaaacagctcaagaggcgccgatatacaggatgggggcggctgtcaagaaaactgatcaatgggatccgagacaagcagagtggaaagacaatcctggattttcttaagtccgatggatttgccaaccggaacttcatgcagttgatccatgatgactctctcacctttaaggaggacatccagaaagcacaagtttctggccagggggacagtcttcacgagcacatcgctaatcttgcaggtagcccagctatcaaaaagggaatactgcagaccgttaaggtcgtggatgaactcgtcaaagtaatgggaaggcataagcccgagaatatcgttatcgagatggcccgagagaaccaaactacccagaagggacagaagaacagtagggaaaggatgaagaggattgaagagggtataaaagaactggggtcccaaatccttaaggaacacccagttgaaaacacccagcttcagaatgagaagctctacctgtactacctgcagaacggcagggacatgtacgtggatcaggaactggacatcaatcggctctccgactacgacgtggatcatatcgtgccccagtcttttctcaaagatgattctattgataataaagtgttgacaagatccgataaaaatagagggaagagtgataacgtcccctcagaagaagttgtcaagaaaatgaaaaattattggcggcagctgctgaacgccaaactgatcacacaacggaagttcgataatctgactaaggctgaacgaggtggcctgtctgagttggataaagccggcttcatcaaaaggcagcttgttgagacacgccagatcaccaagcacgtggcccaaattctcgattcacgcatgaacaccaagtacgatgaaaatgacaaactgattcgagaggtgaaagttattactctgaagtctaagctggtctcagatttcagaaaggactttcagttttataaggtgagagagatcaacaattaccaccatgcgcatgatgcctacctgaatgcagtggtaggcactgcacttatcaaaaaatatcccaagcttgaatctgaatttgtttacggagactataaagtgtacgatgttaggaaaatgatcgcaaagtctgagcaggaaataggcaaggccaccgctaagtacttcttttacagcaatattatgaattttttcaagaccgagattacactggccaatggagagattcggaagcgaccacttatcgaaacaaacggagaaacaggagaaatcgtgtgggacaagggtagggatttcgcgacagtccggaaggtcctgtccatgccgcaggtgaacatcgttaaaaagaccgaagtacagaccggaggcttctccaaggaaagtatcctcccgaaaaggaacagcgacaagctgatcgcacgcaaaaaagattgggaccccaagaaatacggcggattcgattctcctacagtcgcttacagtgtactggttgtggccaaagtggagaaagggaagtctaaaaaactcaaaagcgtcaaggaactgctgggcatcacaatcatggagcgatcaagcttcgaaaaaaaccccatcgactttctcgaggcgaaaggatataaagaggtcaaaaaagacctcatcattaagcttcccaagtactctctctttgagcttgaaaacggccggaaacgaatgctcgctagtgcgggcgagctgcagaaaggtaacgagctggcactgccctctaaatacgttaatttcttgtatctggccagccactatgaaaagctcaaagggtctcccgaagataatgagcagaagcagctgttcgtggaacaacacaaacactaccttgatgagatcatcgagcaaataagcgaattctccaaaagagtgatcctcgccgacgctaacctcgataaggtgctttctgcttacaataagcacagggataagcccatcagggagcaggcagaaaacattatccacttgtttactctgaccaacttgggcgcgcctgcagccttcaagtacttcgacaccaccatagacagaaagcggtacacctctacaaaggaggtcctggacgccacactgattcatcagtcaattacggggctctatgaaacaagaatcgacctctctcagctcggtggagactctggtggttcaactaatttatctgatattattgaaaaagaaacaggtaaacaattagttattcaagaatcaattttaatgttgccagaagaagttgaagaagttattggtaataaaccagaatctgatattttagttcatactgcttatgatgaatctactgatgaaaatgttatgttattgacttcagatgctccagaatataaaccatgggctttagttattcaagattctaatggtgaaaataaaattaaaatgttgtctggtggttcacccaagaagaagaggaaggtg

SEQ ID NO: 71 - DNA, 582 bp, Artificial Sequence
  Deaminase CDA1∆194
atgaccgacgctgagtacgtgagaatccatgagaagttggacatctacacgtttaagaaacagtttttcaacaacaaaaaatccgtgtcgcatagatgctacgttctctttgaattaaaacgacggggtgaacgtagagcgtgtttttggggctatgctgtgaataaaccacagagcgggacagaacgtggcattcacgccgaaatctttagcattagaaaagtcgaagaatacctgcgcgacaaccccggacaattcacgataaattggtactcatcctggagtccttgtgcagattgcgctgaaaagatcttagaatggtataaccaggagctgcgggggaacggccacactttgaaaatctgggcttgcaaactctattacgagaaaaatgcgaggaatcaaattgggctgtggaacctcagagataacggggttgggttgaatgtaatggtaagtgaacactaccaatgttgcaggaaaatattcatccaatcgtcgcacaatcaattgaatgagaatagatggcttgagaagactttgaagcgagctgaaaaacgacggagcgagttgtccattatg

SEQ ID NO: 72 - DNA, 4104 bp, Artificial Sequence; identical to SEQ ID NO: 22
  nCas9

SEQ ID NO: 73 - DNA, 12 bp, Artificial Sequence
  SGGS linker
tctggtggttca

SEQ ID NO: 74 - DNA, 249 bp, Artificial Sequence; identical to SEQ ID NO: 35
  UGI

SEQ ID NO: 75 - DNA, 12 bp, Artificial Sequence
  SGGS linker
tctggtggttca

SEQ ID NO: 76 - DNA, 21 bp, Artificial Sequence
  NLS
cccaagaagaagaggaaggtg

SEQ ID NO: 77 - DNA, 4968 bp, Artificial Sequence
  nCDA1Δ190-BE3
atgaccgacgctgagtacgtgagaatccatgagaagttggacatctacacgtttaagaaacagtttttcaacaacaaaaaatccgtgtcgcatagatgctacgttctctttgaattaaaacgacggggtgaacgtagagcgtgtttttggggctatgctgtgaataaaccacagagcgggacagaacgtggcattcacgccgaaatctttagcattagaaaagtcgaagaatacctgcgcgacaaccccggacaattcacgataaattggtactcatcctggagtccttgtgcagattgcgctgaaaagatcttagaatggtataaccaggagctgcgggggaacggccacactttgaaaatctgggcttgcaaactctattacgagaaaaatgcgaggaatcaaattgggctgtggaacctcagagataacggggttgggttgaatgtaatggtaagtgaacactaccaatgttgcaggaaaatattcatccaatcgtcgcacaatcaattgaatgagaatagatggcttgagaagactttgaagcgagctgaaaaacgacggagcgagatggacaagaagtactccattgggctcgctatcggcacaaacagcgtcggttgggccgtcattacggacgagtacaaggtgccgagcaaaaaattcaaagttctgggcaataccgatcgccacagcataaagaagaacctcattggcgccctcctgttcgactccggggagacggccgaagccacgcggctcaaaagaacagcacggcgcagatatacccgcagaaagaatcggatctgctacctgcaggagatctttagtaatgagatggctaaggtggatgactctttcttccataggctggaggagtcctttttggtggaggaggataaaaagcacgagcgccacccaatctttggcaatatcgtggacgaggtggcgtaccatgaaaagtacccaaccatatatcatctgaggaagaagcttgtagacagtactgataaggctgacttgcggttgatctatctcgcgctggcgcatatgatcaaatttcggggacacttcctcatcgagggggacctgaacccagacaacagcgatgtcgacaaactctttatccaactggttcagacttacaatcagcttttcgaagagaacccgatcaacgcatccggagttgacgccaaagcaatcctgagcgctaggctgtccaaatcccggcggctcgaaaacctcatcgcacagctccctggggagaagaagaacggcctgtttggtaatcttatcgccctgtcactcgggctgacccccaactttaaatctaacttcgacctggccgaagatgccaagcttcaactgagcaaagacacctacgatgatgatctcgacaatctgctggcccagatcggcgaccagtacgcagacctttttttggcggcaaagaacctgtcagacgccattctgctgagtgatattctgcgagtgaacacggagatcaccaaagctccgctgagcgctagtatgatcaagcgctatgatgagcaccaccaagacttgactttgctgaaggcccttgtcagacagcaactgcctgagaagtacaaggaaattttcttcgatcagtctaaaaatggctacgccggatacattgacggcggagcaagccaggaggaattttacaaatttattaagcccatcttggaaaaaatggacggcaccgaggagctgctggtaaagcttaacagagaagatctgttgcgcaaacagcgcactttcgacaatggaagcatcccccaccagattcacctgggcgaactgcacgctatcctcaggcggcaagaggatttctacccctttttgaaagataacagggaaaagattgagaaaatcctcacatttcggataccctactatgtaggccccctcgcccggggaaattccagattcgcgtggatgactcgcaaatcagaagagaccatcactccctggaacttcgaggaagtcgtggataagggggcctctgcccagtccttcatcgaaaggatgactaactttgataaaaatctgcctaacgaaaaggtgcttcctaaacactctctgctgtacgagtacttcacagtttataacgagctcaccaaggtcaaatacgtcacagaagggatgagaaagccagcattcctgtctggagagcagaagaaagctatcgtggacctcctcttcaagacgaaccggaaagttaccgtgaaacagctcaaagaagactatttcaaaaagattgaatgtttcgactctgttgaaatcagcggagtggaggatcgcttcaacgcatccctgggaacgtatcacgatctcctgaaaatcattaaagacaaggacttcctggacaatgaggagaacgaggacattcttgaggacattgtcctcacccttacgttgtttgaagatagggagatgattgaagaacgcttgaaaacttacgctcatctcttcgacgacaaagtcatgaaacagctcaagaggcgccgatatacaggatgggggcggctgtcaagaaaactgatcaatgggatccgagacaagcagagtggaaagacaatcctggattttcttaagtccgatggatttgccaaccggaacttcatgcagttgatccatgatgactctctcacctttaaggaggacatccagaaagcacaagtttctggccagggggacagtcttcacgagcacatcgctaatcttgcaggtagcccagctatcaaaaagggaatactgcagaccgttaaggtcgtggatgaactcgtcaaagtaatgggaaggcataagcccgagaatatcgttatcgagatggcccgagagaaccaaactacccagaagggacagaagaacagtagggaaaggatgaagaggattgaagagggtataaaagaactggggtcccaaatccttaaggaacacccagttgaaaacacccagcttcagaatgagaagctctacctgtactacctgcagaacggcagggacatgtacgtggatcaggaactggacatcaatcggctctccgactacgacgtggatcatatcgtgccccagtcttttctcaaagatgattctattgataataaagtgttgacaagatccgataaaaatagagggaagagtgataacgtcccctcagaagaagttgtcaagaaaatgaaaaattattggcggcagctgctgaacgccaaactgatcacacaacggaagttcgataatctgactaaggctgaacgaggtggcctgtctgagttggataaagccggcttcatcaaaaggcagcttgttgagacacgccagatcaccaagcacgtggcccaaattctcgattcacgcatgaacaccaagtacgatgaaaatgacaaactgattcgagaggtgaaagttattactctgaagtctaagctggtctcagatttcagaaaggactttcagttttataaggtgagagagatcaacaattaccaccatgcgcatgatgcctacctgaatgcagtggtaggcactgcacttatcaaaaaatatcccaagcttgaatctgaatttgtttacggagactataaagtgtacgatgttaggaaaatgatcgcaaagtctgagcaggaaataggcaaggccaccgctaagtacttcttttacagcaatattatgaattttttcaagaccgagattacactggccaatggagagattcggaagcgaccacttatcgaaacaaacggagaaacaggagaaatcgtgtgggacaagggtagggatttcgcgacagtccggaaggtcctgtccatgccgcaggtgaacatcgttaaaaagaccgaagtacagaccggaggcttctccaaggaaagtatcctcccgaaaaggaacagcgacaagctgatcgcacgcaaaaaagattgggaccccaagaaatacggcggattcgattctcctacagtcgcttacagtgtactggttgtggccaaagtggagaaagggaagtctaaaaaactcaaaagcgtcaaggaactgctgggcatcacaatcatggagcgatcaagcttcgaaaaaaaccccatcgactttctcgaggcgaaaggatataaagaggtcaaaaaagacctcatcattaagcttcccaagtactctctctttgagcttgaaaacggccggaaacgaatgctcgctagtgcgggcgagctgcagaaaggtaacgagctggcactgccctctaaatacgttaatttcttgtatctggccagccactatgaaaagctcaaagggtctcccgaagataatgagcagaagcagctgttcgtggaacaacacaaacactaccttgatgagatcatcgagcaaataagcgaattctccaaaagagtgatcctcgccgacgctaacctcgataaggtgctttctgcttacaataagcacagggataagcccatcagggagcaggcagaaaacattatccacttgtttactctgaccaacttgggcgcgcctgcagccttcaagtacttcgacaccaccatagacagaaagcggtacacctctacaaaggaggtcctggacgccacactgattcatcagtcaattacggggctctatgaaacaagaatcgacctctctcagctcggtggagactctggtggttcaactaatttatctgatattattgaaaaagaaacaggtaaacaattagttattcaagaatcaattttaatgttgccagaagaagttgaagaagttattggtaataaaccagaatctgatattttagttcatactgcttatgatgaatctactgatgaaaatgttatgttattgacttcagatgctccagaatataaaccatgggctttagttattcaagattctaatggtgaaaataaaattaaaatgttgtctggtggttcacccaagaagaagaggaaggtg

SEQ ID NO: 78 - DNA, 570 bp, Artificial Sequence
  Deaminase CDA1∆190
atgaccgacgctgagtacgtgagaatccatgagaagttggacatctacacgtttaagaaacagtttttcaacaacaaaaaatccgtgtcgcatagatgctacgttctctttgaattaaaacgacggggtgaacgtagagcgtgtttttggggctatgctgtgaataaaccacagagcgggacagaacgtggcattcacgccgaaatctttagcattagaaaagtcgaagaatacctgcgcgacaaccccggacaattcacgataaattggtactcatcctggagtccttgtgcagattgcgctgaaaagatcttagaatggtataaccaggagctgcgggggaacggccacactttgaaaatctgggcttgcaaactctattacgagaaaaatgcgaggaatcaaattgggctgtggaacctcagagataacggggttgggttgaatgtaatggtaagtgaacactaccaatgttgcaggaaaatattcatccaatcgtcgcacaatcaattgaatgagaatagatggcttgagaagactttgaagcgagctgaaaaacgacggagcgag

SEQ ID NO: 79 - DNA, 4104 bp, Artificial Sequence; identical to SEQ ID NO: 22
  nCas9

SEQ ID NO: 80 - DNA, 12 bp, Artificial Sequence
  SGGS linker
tctggtggttca

SEQ ID NO: 81 - DNA, 249 bp, Artificial Sequence; identical to SEQ ID NO: 35
  UGI

SEQ ID NO: 82 - DNA, 12 bp, Artificial Sequence
  SGGS linker
tctggtggttca

SEQ ID NO: 83 - DNA, 21 bp, Artificial Sequence
  NLS
cccaagaagaagaggaaggtg

SEQ ID NO: 84 - DNA, 5043 bp, Artificial Sequence
  A3A-BE3
atggaagccagcccagcatccgggcccagacacttgatggatccacacatattcacttccaactttaacaatggcattggaaggcataagacctacctgtgctacgaagtggagcgcctggacaatggcacctcggtcaagatggaccagcacaggggctttctacacaaccaggctaagaatcttctctgtggcttttacggccgccatgcggagctgcgcttcttggacctggttccttctttgcagttggacccggcccagatctacagggtcacttggttcatctcctggagcccctgcttctcctggggctgtgccggggaagtgcgtgcgttccttcaggagaacacacacgtgagactgcgtatcttcgctgcccgcatctatgattacgaccccctatataaggaggcactgcaaatgctgcgggatgctggggcccaagtctccatcatgacctacgatgaatttaagcactgctgggacacctttgtggaccaccagggatgtcccttccagccctgggatggactagatgagcacagccaagccctgagtgggaggctgcgggccattctccagaatcagggaaactctggttctgaaactccaggtacttctgaatctgctactccagaatctatggacaagaagtactccattgggctcgctatcggcacaaacagcgtcggttgggccgtcattacggacgagtacaaggtgccgagcaaaaaattcaaagttctgggcaataccgatcgccacagcataaagaagaacctcattggcgccctcctgttcgactccggggagacggccgaagccacgcggctcaaaagaacagcacggcgcagatatacccgcagaaagaatcggatctgctacctgcaggagatctttagtaatgagatggctaaggtggatgactctttcttccataggctggaggagtcctttttggtggaggaggataaaaagcacgagcgccacccaatctttggcaatatcgtggacgaggtggcgtaccatgaaaagtacccaaccatatatcatctgaggaagaagcttgtagacagtactgataaggctgacttgcggttgatctatctcgcgctggcgcatatgatcaaatttcggggacacttcctcatcgagggggacctgaacccagacaacagcgatgtcgacaaactctttatccaactggttcagacttacaatcagcttttcgaagagaacccgatcaacgcatccggagttgacgccaaagcaatcctgagcgctaggctgtccaaatcccggcggctcgaaaacctcatcgcacagctccctggggagaagaagaacggcctgtttggtaatcttatcgccctgtcactcgggctgacccccaactttaaatctaacttcgacctggccgaagatgccaagcttcaactgagcaaagacacctacgatgatgatctcgacaatctgctggcccagatcggcgaccagtacgcagacctttttttggcggcaaagaacctgtcagacgccattctgctgagtgatattctgcgagtgaacacggagatcaccaaagctccgctgagcgctagtatgatcaagcgctatgatgagcaccaccaagacttgactttgctgaaggcccttgtcagacagcaactgcctgagaagtacaaggaaattttcttcgatcagtctaaaaatggctacgccggatacattgacggcggagcaagccaggaggaattttacaaatttattaagcccatcttggaaaaaatggacggcaccgaggagctgctggtaaagcttaacagagaagatctgttgcgcaaacagcgcactttcgacaatggaagcatcccccaccagattcacctgggcgaactgcacgctatcctcaggcggcaagaggatttctacccctttttgaaagataacagggaaaagattgagaaaatcctcacatttcggataccctactatgtaggccccctcgcccggggaaattccagattcgcgtggatgactcgcaaatcagaagagaccatcactccctggaacttcgaggaagtcgtggataagggggcctctgcccagtccttcatcgaaaggatgactaactttgataaaaatctgcctaacgaaaaggtgcttcctaaacactctctgctgtacgagtacttcacagtttataacgagctcaccaaggtcaaatacgtcacagaagggatgagaaagccagcattcctgtctggagagcagaagaaagctatcgtggacctcctcttcaagacgaaccggaaagttaccgtgaaacagctcaaagaagactatttcaaaaagattgaatgtttcgactctgttgaaatcagcggagtggaggatcgcttcaacgcatccctgggaacgtatcacgatctcctgaaaatcattaaagacaaggacttcctggacaatgaggagaacgaggacattcttgaggacattgtcctcacccttacgttgtttgaagatagggagatgattgaagaacgcttgaaaacttacgctcatctcttcgacgacaaagtcatgaaacagctcaagaggcgccgatatacaggatgggggcggctgtcaagaaaactgatcaatgggatccgagacaagcagagtggaaagacaatcctggattttcttaagtccgatggatttgccaaccggaacttcatgcagttgatccatgatgactctctcacctttaaggaggacatccagaaagcacaagtttctggccagggggacagtcttcacgagcacatcgctaatcttgcaggtagcccagctatcaaaaagggaatactgcagaccgttaaggtcgtggatgaactcgtcaaagtaatgggaaggcataagcccgagaatatcgttatcgagatggcccgagagaaccaaactacccagaagggacagaagaacagtagggaaaggatgaagaggattgaagagggtataaaagaactggggtcccaaatccttaaggaacacccagttgaaaacacccagcttcagaatgagaagctctacctgtactacctgcagaacggcagggacatgtacgtggatcaggaactggacatcaatcggctctccgactacgacgtggatcatatcgtgccccagtcttttctcaaagatgattctattgataataaagtgttgacaagatccgataaaaatagagggaagagtgataacgtcccctcagaagaagttgtcaagaaaatgaaaaattattggcggcagctgctgaacgccaaactgatcacacaacggaagttcgataatctgactaaggctgaacgaggtggcctgtctgagttggataaagccggcttcatcaaaaggcagcttgttgagacacgccagatcaccaagcacgtggcccaaattctcgattcacgcatgaacaccaagtacgatgaaaatgacaaactgattcgagaggtgaaagttattactctgaagtctaagctggtctcagatttcagaaaggactttcagttttataaggtgagagagatcaacaattaccaccatgcgcatgatgcctacctgaatgcagtggtaggcactgcacttatcaaaaaatatcccaagcttgaatctgaatttgtttacggagactataaagtgtacgatgttaggaaaatgatcgcaaagtctgagcaggaaataggcaaggccaccgctaagtacttcttttacagcaatattatgaattttttcaagaccgagattacactggccaatggagagattcggaagcgaccacttatcgaaacaaacggagaaacaggagaaatcgtgtgggacaagggtagggatttcgcgacagtccggaaggtcctgtccatgccgcaggtgaacatcgttaaaaagaccgaagtacagaccggaggcttctccaaggaaagtatcctcccgaaaaggaacagcgacaagctgatcgcacgcaaaaaagattgggaccccaagaaatacggcggattcgattctcctacagtcgcttacagtgtactggttgtggccaaagtggagaaagggaagtctaaaaaactcaaaagcgtcaaggaactgctgggcatcacaatcatggagcgatcaagcttcgaaaaaaaccccatcgactttctcgaggcgaaaggatataaagaggtcaaaaaagacctcatcattaagcttcccaagtactctctctttgagcttgaaaacggccggaaacgaatgctcgctagtgcgggcgagctgcagaaaggtaacgagctggcactgccctctaaatacgttaatttcttgtatctggccagccactatgaaaagctcaaagggtctcccgaagataatgagcagaagcagctgttcgtggaacaacacaaacactaccttgatgagatcatcgagcaaataagcgaattctccaaaagagtgatcctcgccgacgctaacctcgataaggtgctttctgcttacaataagcacagggataagcccatcagggagcaggcagaaaacattatccacttgtttactctgaccaacttgggcgcgcctgcagccttcaagtacttcgacaccaccatagacagaaagcggtacacctctacaaaggaggtcctggacgccacactgattcatcagtcaattacggggctctatgaaacaagaatcgacctctctcagctcggtggagactctggtggttcaactaatttatctgatattattgaaaaagaaacaggtaaacaattagttattcaagaatcaattttaatgttgccagaagaagttgaagaagttattggtaataaaccagaatctgatattttagttcatactgcttatgatgaatctactgatgaaaatgttatgttattgacttcagatgctccagaatataaaccatgggctttagttattcaagattctaatggtgaaaataaaattaaaatgttgtctggtggttcacccaagaagaagaggaaggtg

SEQ ID NO: 85 - DNA, 597 bp, Artificial Sequence; identical to SEQ ID NO: 29
  Deaminase A3A

SEQ ID NO: 86 - DNA, 48 bp, Artificial Sequence; identical to SEQ ID NO: 32
  XTEN linker

SEQ ID NO: 87 - DNA, 4104 bp, Artificial Sequence; identical to SEQ ID NO: 22
  nCas9

SEQ ID NO: 88 - DNA, 12 bp, Artificial Sequence
  SGGS linker
tctggtggttca

SEQ ID NO: 89 - DNA, 249 bp, Artificial Sequence; identical to SEQ ID NO: 35
  UGI

SEQ ID NO: 90 - DNA, 12 bp, Artificial Sequence
  SGGS linker
tctggtggttca

SEQ ID NO: 91 - DNA, 21 bp, Artificial Sequence
  NLS
cccaagaagaagaggaaggtg

SEQ ID NO: 92 - DNA, 4995 bp, Artificial Sequence
  A3A-NL-BE3
atggaagccagcccagcatccgggcccagacacttgatggatccacacatattcacttccaactttaacaatggcattggaaggcataagacctacctgtgctacgaagtggagcgcctggacaatggcacctcggtcaagatggaccagcacaggggctttctacacaaccaggctaagaatcttctctgtggcttttacggccgccatgcggagctgcgcttcttggacctggttccttctttgcagttggacccggcccagatctacagggtcacttggttcatctcctggagcccctgcttctcctggggctgtgccggggaagtgcgtgcgttccttcaggagaacacacacgtgagactgcgtatcttcgctgcccgcatctatgattacgaccccctatataaggaggcactgcaaatgctgcgggatgctggggcccaagtctccatcatgacctacgatgaatttaagcactgctgggacacctttgtggaccaccagggatgtcccttccagccctgggatggactagatgagcacagccaagccctgagtgggaggctgcgggccattctccagaatcagggaaacatggacaagaagtactccattgggctcgctatcggcacaaacagcgtcggttgggccgtcattacggacgagtacaaggtgccgagcaaaaaattcaaagttctgggcaataccgatcgccacagcataaagaagaacctcattggcgccctcctgttcgactccggggagacggccgaagccacgcggctcaaaagaacagcacggcgcagatatacccgcagaaagaatcggatctgctacctgcaggagatctttagtaatgagatggctaaggtggatgactctttcttccataggctggaggagtcctttttggtggaggaggataaaaagcacgagcgccacccaatctttggcaatatcgtggacgaggtggcgtaccatgaaaagtacccaaccatatatcatctgaggaagaagcttgtagacagtactgataaggctgacttgcggttgatctatctcgcgctggcgcatatgatcaaatttcggggacacttcctcatcgagggggacctgaacccagacaacagcgatgtcgacaaactctttatccaactggttcagacttacaatcagcttttcgaagagaacccgatcaacgcatccggagttgacgccaaagcaatcctgagcgctaggctgtccaaatcccggcggctcgaaaacctcatcgcacagctccctggggagaagaagaacggcctgtttggtaatcttatcgccctgtcactcgggctgacccccaactttaaatctaacttcgacctggccgaagatgccaagcttcaactgagcaaagacacctacgatgatgatctcgacaatctgctggcccagatcggcgaccagtacgcagacctttttttggcggcaaagaacctgtcagacgccattctgctgagtgatattctgcgagtgaacacggagatcaccaaagctccgctgagcgctagtatgatcaagcgctatgatgagcaccaccaagacttgactttgctgaaggcccttgtcagacagcaactgcctgagaagtacaaggaaattttcttcgatcagtctaaaaatggctacgccggatacattgacggcggagcaagccaggaggaattttacaaatttattaagcccatcttggaaaaaatggacggcaccgaggagctgctggtaaagcttaacagagaagatctgttgcgcaaacagcgcactttcgacaatggaagcatcccccaccagattcacctgggcgaactgcacgctatcctcaggcggcaagaggatttctacccctttttgaaagataacagggaaaagattgagaaaatcctcacatttcggataccctactatgtaggccccctcgcccggggaaattccagattcgcgtggatgactcgcaaatcagaagagaccatcactccctggaacttcgaggaagtcgtggataagggggcctctgcccagtccttcatcgaaaggatgactaactttgataaaaatctgcctaacgaaaaggtgcttcctaaacactctctgctgtacgagtacttcacagtttataacgagctcaccaaggtcaaatacgtcacagaagggatgagaaagccagcattcctgtctggagagcagaagaaagctatcgtggacctcctcttcaagacgaaccggaaagttaccgtgaaacagctcaaagaagactatttcaaaaagattgaatgtttcgactctgttgaaatcagcggagtggaggatcgcttcaacgcatccctgggaacgtatcacgatctcctgaaaatcattaaagacaaggacttcctggacaatgaggagaacgaggacattcttgaggacattgtcctcacccttacgttgtttgaagatagggagatgattgaagaacgcttgaaaacttacgctcatctcttcgacgacaaagtcatgaaacagctcaagaggcgccgatatacaggatgggggcggctgtcaagaaaactgatcaatgggatccgagacaagcagagtggaaagacaatcctggattttcttaagtccgatggatttgccaaccggaacttcatgcagttgatccatgatgactctctcacctttaaggaggacatccagaaagcacaagtttctggccagggggacagtcttcacgagcacatcgctaatcttgcaggtagcccagctatcaaaaagggaatactgcagaccgttaaggtcgtggatgaactcgtcaaagtaatgggaaggcataagcccgagaatatcgttatcgagatggcccgagagaaccaaactacccagaagggacagaagaacagtagggaaaggatgaagaggattgaagagggtataaaagaactggggtcccaaatccttaaggaacacccagttgaaaacacccagcttcagaatgagaagctctacctgtactacctgcagaacggcagggacatgtacgtggatcaggaactggacatcaatcggctctccgactacgacgtggatcatatcgtgccccagtcttttctcaaagatgattctattgataataaagtgttgacaagatccgataaaaatagagggaagagtgataacgtcccctcagaagaagttgtcaagaaaatgaaaaattattggcggcagctgctgaacgccaaactgatcacacaacggaagttcgataatctgactaaggctgaacgaggtggcctgtctgagttggataaagccggcttcatcaaaaggcagcttgttgagacacgccagatcaccaagcacgtggcccaaattctcgattcacgcatgaacaccaagtacgatgaaaatgacaaactgattcgagaggtgaaagttattactctgaagtctaagctggtctcagatttcagaaaggactttcagttttataaggtgagagagatcaacaattaccaccatgcgcatgatgcctacctgaatgcagtggtaggcactgcacttatcaaaaaatatcccaagcttgaatctgaatttgtttacggagactataaagtgtacgatgttaggaaaatgatcgcaaagtctgagcaggaaataggcaaggccaccgctaagtacttcttttacagcaatattatgaattttttcaagaccgagattacactggccaatggagagattcggaagcgaccacttatcgaaacaaacggagaaacaggagaaatcgtgtgggacaagggtagggatttcgcgacagtccggaaggtcctgtccatgccgcaggtgaacatcgttaaaaagaccgaagtacagaccggaggcttctccaaggaaagtatcctcccgaaaaggaacagcgacaagctgatcgcacgcaaaaaagattgggaccccaagaaatacggcggattcgattctcctacagtcgcttacagtgtactggttgtggccaaagtggagaaagggaagtctaaaaaactcaaaagcgtcaaggaactgctgggcatcacaatcatggagcgatcaagcttcgaaaaaaaccccatcgactttctcgaggcgaaaggatataaagaggtcaaaaaagacctcatcattaagcttcccaagtactctctctttgagcttgaaaacggccggaaacgaatgctcgctagtgcgggcgagctgcagaaaggtaacgagctggcactgccctctaaatacgttaatttcttgtatctggccagccactatgaaaagctcaaagggtctcccgaagataatgagcagaagcagctgttcgtggaacaacacaaacactaccttgatgagatcatcgagcaaataagcgaattctccaaaagagtgatcctcgccgacgctaacctcgataaggtgctttctgcttacaataagcacagggataagcccatcagggagcaggcagaaaacattatccacttgtttactctgaccaacttgggcgcgcctgcagccttcaagtacttcgacaccaccatagacagaaagcggtacacctctacaaaggaggtcctggacgccacactgattcatcagtcaattacggggctctatgaaacaagaatcgacctctctcagctcggtggagactctggtggttcaactaatttatctgatattattgaaaaagaaacaggtaaacaattagttattcaagaatcaattttaatgttgccagaagaagttgaagaagttattggtaataaaccagaatctgatattttagttcatactgcttatgatgaatctactgatgaaaatgttatgttattgacttcagatgctccagaatataaaccatgggctttagttattcaagattctaatggtgaaaataaaattaaaatgttgtctggtggttcacccaagaagaagaggaaggtg

SEQ ID NO: 93 - DNA, 597 bp, Artificial Sequence; identical to SEQ ID NO: 29
  Deaminase A3A

SEQ ID NO: 94 - DNA, 4104 bp, Artificial Sequence; identical to SEQ ID NO: 22
  nCas9

SEQ ID NO: 95 - DNA, 12 bp, Artificial Sequence
  SGGS linker
tctggtggttca

SEQ ID NO: 96 - DNA, 249 bp, Artificial Sequence; identical to SEQ ID NO: 35
  UGI

SEQ ID NO: 97 - DNA, 12 bp, Artificial Sequence
  SGGS linker
tctggtggttca

SEQ ID NO: 98 - DNA, 21 bp, Artificial Sequence
  NLS
cccaagaagaagaggaaggtg

SEQ ID NO: 99 - DNA, 4956 bp, Artificial Sequence
  A3AΔ186-BE3
atggaagccagcccagcatccgggcccagacacttgatggatccacacatattcacttccaactttaacaatggcattggaaggcataagacctacctgtgctacgaagtggagcgcctggacaatggcacctcggtcaagatggaccagcacaggggctttctacacaaccaggctaagaatcttctctgtggcttttacggccgccatgcggagctgcgcttcttggacctggttccttctttgcagttggacccggcccagatctacagggtcacttggttcatctcctggagcccctgcttctcctggggctgtgccggggaagtgcgtgcgttccttcaggagaacacacacgtgagactgcgtatcttcgctgcccgcatctatgattacgaccccctatataaggaggcactgcaaatgctgcgggatgctggggcccaagtctccatcatgacctacgatgaatttaagcactgctgggacacctttgtggaccaccagggatgtcccttccagccctgggatggactagatgagcacagccaagccctgatggacaagaagtactccattgggctcgctatcggcacaaacagcgtcggttgggccgtcattacggacgagtacaaggtgccgagcaaaaaattcaaagttctgggcaataccgatcgccacagcataaagaagaacctcattggcgccctcctgttcgactccggggagacggccgaagccacgcggctcaaaagaacagcacggcgcagatatacccgcagaaagaatcggatctgctacctgcaggagatctttagtaatgagatggctaaggtggatgactctttcttccataggctggaggagtcctttttggtggaggaggataaaaagcacgagcgccacccaatctttggcaatatcgtggacgaggtggcgtaccatgaaaagtacccaaccatatatcatctgaggaagaagcttgtagacagtactgataaggctgacttgcggttgatctatctcgcgctggcgcatatgatcaaatttcggggacacttcctcatcgagggggacctgaacccagacaacagcgatgtcgacaaactctttatccaactggttcagacttacaatcagcttttcgaagagaacccgatcaacgcatccggagttgacgccaaagcaatcctgagcgctaggctgtccaaatcccggcggctcgaaaacctcatcgcacagctccctggggagaagaagaacggcctgtttggtaatcttatcgccctgtcactcgggctgacccccaactttaaatctaacttcgacctggccgaagatgccaagcttcaactgagcaaagacacctacgatgatgatctcgacaatctgctggcccagatcggcgaccagtacgcagacctttttttggcggcaaagaacctgtcagacgccattctgctgagtgatattctgcgagtgaacacggagatcaccaaagctccgctgagcgctagtatgatcaagcgctatgatgagcaccaccaagacttgactttgctgaaggcccttgtcagacagcaactgcctgagaagtacaaggaaattttcttcgatcagtctaaaaatggctacgccggatacattgacggcggagcaagccaggaggaattttacaaatttattaagcccatcttggaaaaaatggacggcaccgaggagctgctggtaaagcttaacagagaagatctgttgcgcaaacagcgcactttcgacaatggaagcatcccccaccagattcacctgggcgaactgcacgctatcctcaggcggcaagaggatttctacccctttttgaaagataacagggaaaagattgagaaaatcctcacatttcggataccctactatgtaggccccctcgcccggggaaattccagattcgcgtggatgactcgcaaatcagaagagaccatcactccctggaacttcgaggaagtcgtggataagggggcctctgcccagtccttcatcgaaaggatgactaactttgataaaaatctgcctaacgaaaaggtgcttcctaaacactctctgctgtacgagtacttcacagtttataacgagctcaccaaggtcaaatacgtcacagaagggatgagaaagccagcattcctgtctggagagcagaagaaagctatcgtggacctcctcttcaagacgaaccggaaagttaccgtgaaacagctcaaagaagactatttcaaaaagattgaatgtttcgactctgttgaaatcagcggagtggaggatcgcttcaacgcatccctgggaacgtatcacgatctcctgaaaatcattaaagacaaggacttcctggacaatgaggagaacgaggacattcttgaggacattgtcctcacccttacgttgtttgaagatagggagatgattgaagaacgcttgaaaacttacgctcatctcttcgacgacaaagtcatgaaacagctcaagaggcgccgatatacaggatgggggcggctgtcaagaaaactgatcaatgggatccgagacaagcagagtggaaagacaatcctggattttcttaagtccgatggatttgccaaccggaacttcatgcagttgatccatgatgactctctcacctttaaggaggacatccagaaagcacaagtttctggccagggggacagtcttcacgagcacatcgctaatcttgcaggtagcccagctatcaaaaagggaatactgcagaccgttaaggtcgtggatgaactcgtcaaagtaatgggaaggcataagcccgagaatatcgttatcgagatggcccgagagaaccaaactacccagaagggacagaagaacagtagggaaaggatgaagaggattgaagagggtataaaagaactggggtcccaaatccttaaggaacacccagttgaaaacacccagcttcagaatgagaagctctacctgtactacctgcagaacggcagggacatgtacgtggatcaggaactggacatcaatcggctctccgactacgacgtggatcatatcgtgccccagtcttttctcaaagatgattctattgataataaagtgttgacaagatccgataaaaatagagggaagagtgataacgtcccctcagaagaagttgtcaagaaaatgaaaaattattggcggcagctgctgaacgccaaactgatcacacaacggaagttcgataatctgactaaggctgaacgaggtggcctgtctgagttggataaagccggcttcatcaaaaggcagcttgttgagacacgccagatcaccaagcacgtggcccaaattctcgattcacgcatgaacaccaagtacgatgaaaatgacaaactgattcgagaggtgaaagttattactctgaagtctaagctggtctcagatttcagaaaggactttcagttttataaggtgagagagatcaacaattaccaccatgcgcatgatgcctacctgaatgcagtggtaggcactgcacttatcaaaaaatatcccaagcttgaatctgaatttgtttacggagactataaagtgtacgatgttaggaaaatgatcgcaaagtctgagcaggaaataggcaaggccaccgctaagtacttcttttacagcaatattatgaattttttcaagaccgagattacactggccaatggagagattcggaagcgaccacttatcgaaacaaacggagaaacaggagaaatcgtgtgggacaagggtagggatttcgcgacagtccggaaggtcctgtccatgccgcaggtgaacatcgttaaaaagaccgaagtacagaccggaggcttctccaaggaaagtatcctcccgaaaaggaacagcgacaagctgatcgcacgcaaaaaagattgggaccccaagaaatacggcggattcgattctcctacagtcgcttacagtgtactggttgtggccaaagtggagaaagggaagtctaaaaaactcaaaagcgtcaaggaactgctgggcatcacaatcatggagcgatcaagcttcgaaaaaaaccccatcgactttctcgaggcgaaaggatataaagaggtcaaaaaagacctcatcattaagcttcccaagtactctctctttgagcttgaaaacggccggaaacgaatgctcgctagtgcgggcgagctgcagaaaggtaacgagctggcactgccctctaaatacgttaatttcttgtatctggccagccactatgaaaagctcaaagggtctcccgaagataatgagcagaagcagctgttcgtggaacaacacaaacactaccttgatgagatcatcgagcaaataagcgaattctccaaaagagtgatcctcgccgacgctaacctcgataaggtgctttctgcttacaataagcacagggataagcccatcagggagcaggcagaaaacattatccacttgtttactctgaccaacttgggcgcgcctgcagccttcaagtacttcgacaccaccatagacagaaagcggtacacctctacaaaggaggtcctggacgccacactgattcatcagtcaattacggggctctatgaaacaagaatcgacctctctcagctcggtggagactctggtggttcaactaatttatctgatattattgaaaaagaaacaggtaaacaattagttattcaagaatcaattttaatgttgccagaagaagttgaagaagttattggtaataaaccagaatctgatattttagttcatactgcttatgatgaatctactgatgaaaatgttatgttattgacttcagatgctccagaatataaaccatgggctttagttattcaagattctaatggtgaaaataaaattaaaatgttgtctggtggttcacccaagaagaagaggaaggtg

SEQ ID NO: 100 - DNA, 558 bp, Artificial Sequence
  Deaminase A3A∆186
atggaagccagcccagcatccgggcccagacacttgatggatccacacatattcacttccaactttaacaatggcattggaaggcataagacctacctgtgctacgaagtggagcgcctggacaatggcacctcggtcaagatggaccagcacaggggctttctacacaaccaggctaagaatcttctctgtggcttttacggccgccatgcggagctgcgcttcttggacctggttccttctttgcagttggacccggcccagatctacagggtcacttggttcatctcctggagcccctgcttctcctggggctgtgccggggaagtgcgtgcgttccttcaggagaacacacacgtgagactgcgtatcttcgctgcccgcatctatgattacgaccccctatataaggaggcactgcaaatgctgcgggatgctggggcccaagtctccatcatgacctacgatgaatttaagcactgctgggacacctttgtggaccaccagggatgtcccttccagccctgggatggactagatgagcacagccaagccctg

SEQ ID NO: 101 - DNA, 4104 bp, Artificial Sequence; identical to SEQ ID NO: 22
  nCas9

SEQ ID NO: 102 - DNA, 12 bp, Artificial Sequence
  SGGS linker
tctggtggttca

SEQ ID NO: 103 - DNA, 249 bp, Artificial Sequence; identical to SEQ ID NO: 35
  UGI

SEQ ID NO: 104 - DNA, 12 bp, Artificial Sequence
  SGGS linker
tctggtggttca

SEQ ID NO: 105 - DNA, 21 bp, Artificial Sequence
  NLS
cccaagaagaagaggaaggtg

SEQ ID NO: 106 - DNA, 4944 bp, Artificial Sequence
  A3AΔ182-BE3
atggaagccagcccagcatccgggcccagacacttgatggatccacacatattcacttccaactttaacaatggcattggaaggcataagacctacctgtgctacgaagtggagcgcctggacaatggcacctcggtcaagatggaccagcacaggggctttctacacaaccaggctaagaatcttctctgtggcttttacggccgccatgcggagctgcgcttcttggacctggttccttctttgcagttggacccggcccagatctacagggtcacttggttcatctcctggagcccctgcttctcctggggctgtgccggggaagtgcgtgcgttccttcaggagaacacacacgtgagactgcgtatcttcgctgcccgcatctatgattacgaccccctatataaggaggcactgcaaatgctgcgggatgctggggcccaagtctccatcatgacctacgatgaatttaagcactgctgggacacctttgtggaccaccagggatgtcccttccagccctgggatggactagatgagcacatggacaagaagtactccattgggctcgctatcggcacaaacagcgtcggttgggccgtcattacggacgagtacaaggtgccgagcaaaaaattcaaagttctgggcaataccgatcgccacagcataaagaagaacctcattggcgccctcctgttcgactccggggagacggccgaagccacgcggctcaaaagaacagcacggcgcagatatacccgcagaaagaatcggatctgctacctgcaggagatctttagtaatgagatggctaaggtggatgactctttcttccataggctggaggagtcctttttggtggaggaggataaaaagcacgagcgccacccaatctttggcaatatcgtggacgaggtggcgtaccatgaaaagtacccaaccatatatcatctgaggaagaagcttgtagacagtactgataaggctgacttgcggttgatctatctcgcgctggcgcatatgatcaaatttcggggacacttcctcatcgagggggacctgaacccagacaacagcgatgtcgacaaactctttatccaactggttcagacttacaatcagcttttcgaagagaacccgatcaacgcatccggagttgacgccaaagcaatcctgagcgctaggctgtccaaatcccggcggctcgaaaacctcatcgcacagctccctggggagaagaagaacggcctgtttggtaatcttatcgccctgtcactcgggctgacccccaactttaaatctaacttcgacctggccgaagatgccaagcttcaactgagcaaagacacctacgatgatgatctcgacaatctgctggcccagatcggcgaccagtacgcagacctttttttggcggcaaagaacctgtcagacgccattctgctgagtgatattctgcgagtgaacacggagatcaccaaagctccgctgagcgctagtatgatcaagcgctatgatgagcaccaccaagacttgactttgctgaaggcccttgtcagacagcaactgcctgagaagtacaaggaaattttcttcgatcagtctaaaaatggctacgccggatacattgacggcggagcaagccaggaggaattttacaaatttattaagcccatcttggaaaaaatggacggcaccgaggagctgctggtaaagcttaacagagaagatctgttgcgcaaacagcgcactttcgacaatggaagcatcccccaccagattcacctgggcgaactgcacgctatcctcaggcggcaagaggatttctacccctttttgaaagataacagggaaaagattgagaaaatcctcacatttcggataccctactatgtaggccccctcgcccggggaaattccagattcgcgtggatgactcgcaaatcagaagagaccatcactccctggaacttcgaggaagtcgtggataagggggcctctgcccagtccttcatcgaaaggatgactaactttgataaaaatctgcctaacgaaaaggtgcttcctaaacactctctgctgtacgagtacttcacagtttataacgagctcaccaaggtcaaatacgtcacagaagggatgagaaagccagcattcctgtctggagagcagaagaaagctatcgtggacctcctcttcaagacgaaccggaaagttaccgtgaaacagctcaaagaagactatttcaaaaagattgaatgtttcgactctgttgaaatcagcggagtggaggatcgcttcaacgcatccctgggaacgtatcacgatctcctgaaaatcattaaagacaaggacttcctggacaatgaggagaacgaggacattcttgaggacattgtcctcacccttacgttgtttgaagatagggagatgattgaagaacgcttgaaaacttacgctcatctcttcgacgacaaagtcatgaaacagctcaagaggcgccgatatacaggatgggggcggctgtcaagaaaactgatcaatgggatccgagacaagcagagtggaaagacaatcctggattttcttaagtccgatggatttgccaaccggaacttcatgcagttgatccatgatgactctctcacctttaaggaggacatccagaaagcacaagtttctggccagggggacagtcttcacgagcacatcgctaatcttgcaggtagcccagctatcaaaaagggaatactgcagaccgttaaggtcgtggatgaactcgtcaaagtaatgggaaggcataagcccgagaatatcgttatcgagatggcccgagagaaccaaactacccagaagggacagaagaacagtagggaaaggatgaagaggattgaagagggtataaaagaactggggtcccaaatccttaaggaacacccagttgaaaacacccagcttcagaatgagaagctctacctgtactacctgcagaacggcagggacatgtacgtggatcaggaactggacatcaatcggctctccgactacgacgtggatcatatcgtgccccagtcttttctcaaagatgattctattgataataaagtgttgacaagatccgataaaaatagagggaagagtgataacgtcccctcagaagaagttgtcaagaaaatgaaaaattattggcggcagctgctgaacgccaaactgatcacacaacggaagttcgataatctgactaaggctgaacgaggtggcctgtctgagttggataaagccggcttcatcaaaaggcagcttgttgagacacgccagatcaccaagcacgtggcccaaattctcgattcacgcatgaacaccaagtacgatgaaaatgacaaactgattcgagaggtgaaagttattactctgaagtctaagctggtctcagatttcagaaaggactttcagttttataaggtgagagagatcaacaattaccaccatgcgcatgatgcctacctgaatgcagtggtaggcactgcacttatcaaaaaatatcccaagcttgaatctgaatttgtttacggagactataaagtgtacgatgttaggaaaatgatcgcaaagtctgagcaggaaataggcaaggccaccgctaagtacttcttttacagcaatattatgaattttttcaagaccgagattacactggccaatggagagattcggaagcgaccacttatcgaaacaaacggagaaacaggagaaatcgtgtgggacaagggtagggatttcgcgacagtccggaaggtcctgtccatgccgcaggtgaacatcgttaaaaagaccgaagtacagaccggaggcttctccaaggaaagtatcctcccgaaaaggaacagcgacaagctgatcgcacgcaaaaaagattgggaccccaagaaatacggcggattcgattctcctacagtcgcttacagtgtactggttgtggccaaagtggagaaagggaagtctaaaaaactcaaaagcgtcaaggaactgctgggcatcacaatcatggagcgatcaagcttcgaaaaaaaccccatcgactttctcgaggcgaaaggatataaagaggtcaaaaaagacctcatcattaagcttcccaagtactctctctttgagcttgaaaacggccggaaacgaatgctcgctagtgcgggcgagctgcagaaaggtaacgagctggcactgccctctaaatacgttaatttcttgtatctggccagccactatgaaaagctcaaagggtctcccgaagataatgagcagaagcagctgttcgtggaacaacacaaacactaccttgatgagatcatcgagcaaataagcgaattctccaaaagagtgatcctcgccgacgctaacctcgataaggtgctttctgcttacaataagcacagggataagcccatcagggagcaggcagaaaacattatccacttgtttactctgaccaacttgggcgcgcctgcagccttcaagtacttcgacaccaccatagacagaaagcggtacacctctacaaaggaggtcctggacgccacactgattcatcagtcaattacggggctctatgaaacaagaatcgacctctctcagctcggtggagactctggtggttcaactaatttatctgatattattgaaaaagaaacaggtaaacaattagttattcaagaatcaattttaatgttgccagaagaagttgaagaagttattggtaataaaccagaatctgatattttagttcatactgcttatgatgaatctactgatgaaaatgttatgttattgacttcagatgctccagaatataaaccatgggctttagttattcaagattctaatggtgaaaataaaattaaaatgttgtctggtggttcacccaagaagaagaggaaggtg

SEQ ID NO: 107 - DNA, 546 bp, Artificial Sequence
  Deaminase A3A∆182
atggaagccagcccagcatccgggcccagacacttgatggatccacacatattcacttccaactttaacaatggcattggaaggcataagacctacctgtgctacgaagtggagcgcctggacaatggcacctcggtcaagatggaccagcacaggggctttctacacaaccaggctaagaatcttctctgtggcttttacggccgccatgcggagctgcgcttcttggacctggttccttctttgcagttggacccggcccagatctacagggtcacttggttcatctcctggagcccctgcttctcctggggctgtgccggggaagtgcgtgcgttccttcaggagaacacacacgtgagactgcgtatcttcgctgcccgcatctatgattacgaccccctatataaggaggcactgcaaatgctgcgggatgctggggcccaagtctccatcatgacctacgatgaatttaagcactgctgggacacctttgtggaccaccagggatgtcccttccagccctgggatggactagatgagcac

SEQ ID NO: 108 - DNA, 4104 bp, Artificial Sequence; identical to SEQ ID NO: 22
  nCas9

SEQ ID NO: 109 - DNA, 12 bp, Artificial Sequence
  SGGS linker
tctggtggttca

SEQ ID NO: 110 - DNA, 249 bp, Artificial Sequence; identical to SEQ ID NO: 35
  UGI

SEQ ID NO: 111 - DNA, 12 bp, Artificial Sequence
  SGGS linker
tctggtggttca

SEQ ID NO: 112 - DNA, 21 bp, Artificial Sequence
  NLS
cccaagaagaagaggaaggtg

SEQ ID NO: 113 - DNA, 4956 bp, Artificial Sequence
  A3A(Y130F)Δ186-BE3
atggaagccagcccagcatccgggcccagacacttgatggatccacacatattcacttccaactttaacaatggcattggaaggcataagacctacctgtgctacgaagtggagcgcctggacaatggcacctcggtcaagatggaccagcacaggggctttctacacaaccaggctaagaatcttctctgtggcttttacggccgccatgcggagctgcgcttcttggacctggttccttctttgcagttggacccggcccagatctacagggtcacttggttcatctcctggagcccctgcttctcctggggctgtgccggggaagtgcgtgcgttccttcaggagaacacacacgtgagactgcgtatcttcgctgcccgcatctttgattacgaccccctatataaggaggcactgcaaatgctgcgggatgctggggcccaagtctccatcatgacctacgatgaatttaagcactgctgggacacctttgtggaccaccagggatgtcccttccagccctgggatggactagatgagcacagccaagccctgatggacaagaagtactccattgggctcgctatcggcacaaacagcgtcggttgggccgtcattacggacgagtacaaggtgccgagcaaaaaattcaaagttctgggcaataccgatcgccacagcataaagaagaacctcattggcgccctcctgttcgactccggggagacggccgaagccacgcggctcaaaagaacagcacggcgcagatatacccgcagaaagaatcggatctgctacctgcaggagatctttagtaatgagatggctaaggtggatgactctttcttccataggctggaggagtcctttttggtggaggaggataaaaagcacgagcgccacccaatctttggcaatatcgtggacgaggtggcgtaccatgaaaagtacccaaccatatatcatctgaggaagaagcttgtagacagtactgataaggctgacttgcggttgatctatctcgcgctggcgcatatgatcaaatttcggggacacttcctcatcgagggggacctgaacccagacaacagcgatgtcgacaaactctttatccaactggttcagacttacaatcagcttttcgaagagaacccgatcaacgcatccggagttgacgccaaagcaatcctgagcgctaggctgtccaaatcccggcggctcgaaaacctcatcgcacagctccctggggagaagaagaacggcctgtttggtaatcttatcgccctgtcactcgggctgacccccaactttaaatctaacttcgacctggccgaagatgccaagcttcaactgagcaaagacacctacgatgatgatctcgacaatctgctggcccagatcggcgaccagtacgcagacctttttttggcggcaaagaacctgtcagacgccattctgctgagtgatattctgcgagtgaacacggagatcaccaaagctccgctgagcgctagtatgatcaagcgctatgatgagcaccaccaagacttgactttgctgaaggcccttgtcagacagcaactgcctgagaagtacaaggaaattttcttcgatcagtctaaaaatggctacgccggatacattgacggcggagcaagccaggaggaattttacaaatttattaagcccatcttggaaaaaatggacggcaccgaggagctgctggtaaagcttaacagagaagatctgttgcgcaaacagcgcactttcgacaatggaagcatcccccaccagattcacctgggcgaactgcacgctatcctcaggcggcaagaggatttctacccctttttgaaagataacagggaaaagattgagaaaatcctcacatttcggataccctactatgtaggccccctcgcccggggaaattccagattcgcgtggatgactcgcaaatcagaagagaccatcactccctggaacttcgaggaagtcgtggataagggggcctctgcccagtccttcatcgaaaggatgactaactttgataaaaatctgcctaacgaaaaggtgcttcctaaacactctctgctgtacgagtacttcacagtttataacgagctcaccaaggtcaaatacgtcacagaagggatgagaaagccagcattcctgtctggagagcagaagaaagctatcgtggacctcctcttcaagacgaaccggaaagttaccgtgaaacagctcaaagaagactatttcaaaaagattgaatgtttcgactctgttgaaatcagcggagtggaggatcgcttcaacgcatccctgggaacgtatcacgatctcctgaaaatcattaaagacaaggacttcctggacaatgaggagaacgaggacattcttgaggacattgtcctcacccttacgttgtttgaagatagggagatgattgaagaacgcttgaaaacttacgctcatctcttcgacgacaaagtcatgaaacagctcaagaggcgccgatatacaggatgggggcggctgtcaagaaaactgatcaatgggatccgagacaagcagagtggaaagacaatcctggattttcttaagtccgatggatttgccaaccggaacttcatgcagttgatccatgatgactctctcacctttaaggaggacatccagaaagcacaagtttctggccagggggacagtcttcacgagcacatcgctaatcttgcaggtagcccagctatcaaaaagggaatactgcagaccgttaaggtcgtggatgaactcgtcaaagtaatgggaaggcataagcccgagaatatcgttatcgagatggcccgagagaaccaaactacccagaagggacagaagaacagtagggaaaggatgaagaggattgaagagggtataaaagaactggggtcccaaatccttaaggaacacccagttgaaaacacccagcttcagaatgagaagctctacctgtactacctgcagaacggcagggacatgtacgtggatcaggaactggacatcaatcggctctccgactacgacgtggatcatatcgtgccccagtcttttctcaaagatgattctattgataataaagtgttgacaagatccgataaaaatagagggaagagtgataacgtcccctcagaagaagttgtcaagaaaatgaaaaattattggcggcagctgctgaacgccaaactgatcacacaacggaagttcgataatctgactaaggctgaacgaggtggcctgtctgagttggataaagccggcttcatcaaaaggcagcttgttgagacacgccagatcaccaagcacgtggcccaaattctcgattcacgcatgaacaccaagtacgatgaaaatgacaaactgattcgagaggtgaaagttattactctgaagtctaagctggtctcagatttcagaaaggactttcagttttataaggtgagagagatcaacaattaccaccatgcgcatgatgcctacctgaatgcagtggtaggcactgcacttatcaaaaaatatcccaagcttgaatctgaatttgtttacggagactataaagtgtacgatgttaggaaaatgatcgcaaagtctgagcaggaaataggcaaggccaccgctaagtacttcttttacagcaatattatgaattttttcaagaccgagattacactggccaatggagagattcggaagcgaccacttatcgaaacaaacggagaaacaggagaaatcgtgtgggacaagggtagggatttcgcgacagtccggaaggtcctgtccatgccgcaggtgaacatcgttaaaaagaccgaagtacagaccggaggcttctccaaggaaagtatcctcccgaaaaggaacagcgacaagctgatcgcacgcaaaaaagattgggaccccaagaaatacggcggattcgattctcctacagtcgcttacagtgtactggttgtggccaaagtggagaaagggaagtctaaaaaactcaaaagcgtcaaggaactgctgggcatcacaatcatggagcgatcaagcttcgaaaaaaaccccatcgactttctcgaggcgaaaggatataaagaggtcaaaaaagacctcatcattaagcttcccaagtactctctctttgagcttgaaaacggccggaaacgaatgctcgctagtgcgggcgagctgcagaaaggtaacgagctggcactgccctctaaatacgttaatttcttgtatctggccagccactatgaaaagctcaaagggtctcccgaagataatgagcagaagcagctgttcgtggaacaacacaaacactaccttgatgagatcatcgagcaaataagcgaattctccaaaagagtgatcctcgccgacgctaacctcgataaggtgctttctgcttacaataagcacagggataagcccatcagggagcaggcagaaaacattatccacttgtttactctgaccaacttgggcgcgcctgcagccttcaagtacttcgacaccaccatagacagaaagcggtacacctctacaaaggaggtcctggacgccacactgattcatcagtcaattacggggctctatgaaacaagaatcgacctctctcagctcggtggagactctggtggttcaactaatttatctgatattattgaaaaagaaacaggtaaacaattagttattcaagaatcaattttaatgttgccagaagaagttgaagaagttattggtaataaaccagaatctgatattttagttcatactgcttatgatgaatctactgatgaaaatgttatgttattgacttcagatgctccagaatataaaccatgggctttagttattcaagattctaatggtgaaaataaaattaaaatgttgtctggtggttcacccaagaagaagaggaaggtg

SEQ ID NO: 114 - DNA, 558 bp, Artificial Sequence
  Deaminase A3A(Y130F)Δ186
atggaagccagcccagcatccgggcccagacacttgatggatccacacatattcacttccaactttaacaatggcattggaaggcataagacctacctgtgctacgaagtggagcgcctggacaatggcacctcggtcaagatggaccagcacaggggctttctacacaaccaggctaagaatcttctctgtggcttttacggccgccatgcggagctgcgcttcttggacctggttccttctttgcagttggacccggcccagatctacagggtcacttggttcatctcctggagcccctgcttctcctggggctgtgccggggaagtgcgtgcgttccttcaggagaacacacacgtgagactgcgtatcttcgctgcccgcatctttgattacgaccccctatataaggaggcactgcaaatgctgcgggatgctggggcccaagtctccatcatgacctacgatgaatttaagcactgctgggacacctttgtggaccaccagggatgtcccttccagccctgggatggactagatgagcacagccaagccctg

SEQ ID NO: 115 - DNA, 4104 bp, Artificial Sequence; identical to SEQ ID NO: 22
  nCas9

SEQ ID NO: 116 - DNA, 12 bp, Artificial Sequence
  SGGS linker
tctggtggttca

SEQ ID NO: 117 - DNA, 249 bp, Artificial Sequence; identical to SEQ ID NO: 35
  UGI

SEQ ID NO: 118 - DNA, 12 bp, Artificial Sequence
  SGGS linker
tctggtggttca

SEQ ID NO: 119 - DNA, 21 bp, Artificial Sequence
  NLS
cccaagaagaagaggaaggtg

SEQ ID NO: 120 - protein, 1368 aa, Artificial Sequence; identical to SEQ ID NO: 1
  Cas9 nickase (nCas9)

SEQ ID NO: 121 - protein, 1368 aa, Artificial Sequence
  VQR-nCas9
MDKKYSIGLAIGTNSVGWAVITDEYKVPSKKFKVLGNTDRHSIKKNLIGALLFDSGETAEATRLKRTARRRYTRRKNRICYLQEIFSNEMAKVDDSFFHRLEESFLVEEDKKHERHPIFGNIVDEVAYHEKYPTIYHLRKKLVDSTDKADLRLIYLALAHMIKFRGHFLIEGDLNPDNSDVDKLFIQLVQTYNQLFEENPINASGVDAKAILSARLSKSRRLENLIAQLPGEKKNGLFGNLIALSLGLTPNFKSNFDLAEDAKLQLSKDTYDDDLDNLLAQIGDQYADLFLAAKNLSDAILLSDILRVNTEITKAPLSASMIKRYDEHHQDLTLLKALVRQQLPEKYKEIFFDQSKNGYAGYIDGGASQEEFYKFIKPILEKMDGTEELLVKLNREDLLRKQRTFDNGSIPHQIHLGELHAILRRQEDFYPFLKDNREKIEKILTFRIPYYVGPLARGNSRFAWMTRKSEETITPWNFEEVVDKGASAQSFIERMTNFDKNLPNEKVLPKHSLLYEYFTVYNELTKVKYVTEGMRKPAFLSGEQKKAIVDLLFKTNRKVTVKQLKEDYFKKIECFDSVEISGVEDRFNASLGTYHDLLKIIKDKDFLDNEENEDILEDIVLTLTLFEDREMIEERLKTYAHLFDDKVMKQLKRRRYTGWGRLSRKLINGIRDKQSGKTILDFLKSDGFANRNFMQLIHDDSLTFKEDIQKAQVSGQGDSLHEHIANLAGSPAIKKGILQTVKVVDELVKVMGRHKPENIVIEMARENQTTQKGQKNSRERMKRIEEGIKELGSQILKEHPVENTQLQNEKLYLYYLQNGRDMYVDQELDINRLSDYDVDHIVPQSFLKDDSIDNKVLTRSDKNRGKSDNVPSEEVVKKMKNYWRQLLNAKLITQRKFDNLTKAERGGLSELDKAGFIKRQLVETRQITKHVAQILDSRMNTKYDENDKLIREVKVITLKSKLVSDFRKDFQFYKVREINNYHHAHDAYLNAVVGTALIKKYPKLESEFVYGDYKVYDVRKMIAKSEQEIGKATAKYFFYSNIMNFFKTEITLANGEIRKRPLIETNGETGEIVWDKGRDFATVRKVLSMPQVNIVKKTEVQTGGFSKESILPKRNSDKLIARKKDWDPKKYGGFVSPTVAYSVLVVAKVEKGKSKKLKSVKELLGITIMERSSFEKNPIDFLEAKGYKEVKKDLIIKLPKYSLFELENGRKRMLASAGELQKGNELALPSKYVNFLYLASHYEKLKGSPEDNEQKQLFVEQHKHYLDEIIEQISEFSKRVILADANLDKVLSAYNKHRDKPIREQAENIIHLFTLTNLGAPAAFKYFDTTIDRKQYRSTKEVLDATLIHQSITGLYETRIDLSQLGGD

SEQ ID NO: 122 - protein, 1368 aa, Artificial Sequence
  VRER-nCas9
MDKKYSIGLAIGTNSVGWAVITDEYKVPSKKFKVLGNTDRHSIKKNLIGALLFDSGETAEATRLKRTARRRYTRRKNRICYLQEIFSNEMAKVDDSFFHRLEESFLVEEDKKHERHPIFGNIVDEVAYHEKYPTIYHLRKKLVDSTDKADLRLIYLALAHMIKFRGHFLIEGDLNPDNSDVDKLFIQLVQTYNQLFEENPINASGVDAKAILSARLSKSRRLENLIAQLPGEKKNGLFGNLIALSLGLTPNFKSNFDLAEDAKLQLSKDTYDDDLDNLLAQIGDQYADLFLAAKNLSDAILLSDILRVNTEITKAPLSASMIKRYDEHHQDLTLLKALVRQQLPEKYKEIFFDQSKNGYAGYIDGGASQEEFYKFIKPILEKMDGTEELLVKLNREDLLRKQRTFDNGSIPHQIHLGELHAILRRQEDFYPFLKDNREKIEKILTFRIPYYVGPLARGNSRFAWMTRKSEETITPWNFEEVVDKGASAQSFIERMTNFDKNLPNEKVLPKHSLLYEYFTVYNELTKVKYVTEGMRKPAFLSGEQKKAIVDLLFKTNRKVTVKQLKEDYFKKIECFDSVEISGVEDRFNASLGTYHDLLKIIKDKDFLDNEENEDILEDIVLTLTLFEDREMIEERLKTYAHLFDDKVMKQLKRRRYTGWGRLSRKLINGIRDKQSGKTILDFLKSDGFANRNFMQLIHDDSLTFKEDIQKAQVSGQGDSLHEHIANLAGSPAIKKGILQTVKVVDELVKVMGRHKPENIVIEMARENQTTQKGQKNSRERMKRIEEGIKELGSQILKEHPVENTQLQNEKLYLYYLQNGRDMYVDQELDINRLSDYDVDHIVPQSFLKDDSIDNKVLTRSDKNRGKSDNVPSEEVVKKMKNYWRQLLNAKLITQRKFDNLTKAERGGLSELDKAGFIKRQLVETRQITKHVAQILDSRMNTKYDENDKLIREVKVITLKSKLVSDFRKDFQFYKVREINNYHHAHDAYLNAVVGTALIKKYPKLESEFVYGDYKVYDVRKMIAKSEQEIGKATAKYFFYSNIMNFFKTEITLANGEIRKRPLIETNGETGEIVWDKGRDFATVRKVLSMPQVNIVKKTEVQTGGFSKESILPKRNSDKLIARKKDWDPKKYGGFVSPTVAYSVLVVAKVEKGKSKKLKSVKELLGITIMERSSFEKNPIDFLEAKGYKEVKKDLIIKLPKYSLFELENGRKRMLASARELQKGNELALPSKYVNFLYLASHYEKLKGSPEDNEQKQLFVEQHKHYLDEIIEQISEFSKRVILADANLDKVLSAYNKHRDKPIREQAENIIHLFTLTNLGAPAAFKYFDTTIDRKEYRSTKEVLDATLIHQSITGLYETRIDLSQLGGD

SEQ ID NO: 123 - protein, 1368 aa, Artificial Sequence
  x-nCas9
MDKKYSIGLAIGTNSVGWAVITDEYKVPSKKFKVLGNTDRHSIKKNLIGALLFDSGETAEATRLKRTARRRYTRRKNRICYLQEIFSNEMAKVDDSFFHRLEESFLVEEDKKHERHPIFGNIVDEVAYHEKYPTIYHLRKKLVDSTDKADLRLIYLALAHMIKFRGHFLIEGDLNPDNSDVDKLFIQLVQTYNQLFEENPINASGVDAKAILSARLSKSRRLENLIAQLPGEKKNGLFGNLIALSLGLTPNFKSNFDLAEDTKLQLSKDTYDDDLDNLLAQIGDQYADLFLAAKNLSDAILLSDILRVNTEITKAPLSASMIKLYDEHHQDLTLLKALVRQQLPEKYKEIFFDQSKNGYAGYIDGGASQEEFYKFIKPILEKMDGTEELLVKLNREDLLRKQRTFDNGIIPHQIHLGELHAILRRQEDFYPFLKDNREKIEKILTFRIPYYVGPLARGNSRFAWMTRKSEETITPWNFEKVVDKGASAQSFIERMTNFDKNLPNEKVLPKHSLLYEYFTVYNELTKVKYVTEGMRKPAFLSGDQKKAIVDLLFKTNRKVTVKQLKEDYFKKIECFDSVEISGVEDRFNASLGTYHDLLKIIKDKDFLDNEENEDILEDIVLTLTLFEDREMIEERLKTYAHLFDDKVMKQLKRRRYTGWGRLSRKLINGIRDKQSGKTILDFLKSDGFANRNFIQLIHDDSLTFKEDIQKAQVSGQGDSLHEHIANLAGSPAIKKGILQTVKVVDELVKVMGRHKPENIVIEMARENQTTQKGQKNSRERMKRIEEGIKELGSQILKEHPVENTQLQNEKLYLYYLQNGRDMYVDQELDINRLSDYDVDHIVPQSFLKDDSIDNKVLTRSDKNRGKSDNVPSEEVVKKMKNYWRQLLNAKLITQRKFDNLTKAERGGLSELDKAGFIKRQLVETRQITKHVAQILDSRMNTKYDENDKLIREVKVITLKSKLVSDFRKDFQFYKVREINNYHHAHDAYLNAVVGTALIKKYPKLESEFVYGDYKVYDVRKMIAKSEQEIGKATAKYFFYSNIMNFFKTEITLANGEIRKRPLIETNGETGEIVWDKGRDFATVRKVLSMPQVNIVKKTEVQTGGFSKESILPKRNSDKLIARKKDWDPKKYGGFDSPTVAYSVLVVAKVEKGKSKKLKSVKELLGITIMERSSFEKNPIDFLEAKGYKEVKKDLIIKLPKYSLFELENGRKRMLASAGVLQKGNELALPSKYVNFLYLASHYEKLKGSPEDNEQKQLFVEQHKHYLDEIIEQISEFSKRVILADANLDKVLSAYNKHRDKPIREQAENIIHLFTLTNLGAPAAFKYFDTTIDRKRYTSTKEVLDATLIHQSITGLYETRIDLSQLGGD

SEQ ID NO: 124 - protein, 1368 aa, Artificial Sequence
  NG-nCas9
MDKKYSIGLAIGTNSVGWAVITDEYKVPSKKFKVLGNTDRHSIKKNLIGALLFDSGETAEATRLKRTARRRYTRRKNRICYLQEIFSNEMAKVDDSFFHRLEESFLVEEDKKHERHPIFGNIVDEVAYHEKYPTIYHLRKKLVDSTDKADLRLIYLALAHMIKFRGHFLIEGDLNPDNSDVDKLFIQLVQTYNQLFEENPINASGVDAKAILSARLSKSRRLENLIAQLPGEKKNGLFGNLIALSLGLTPNFKSNFDLAEDAKLQLSKDTYDDDLDNLLAQIGDQYADLFLAAKNLSDAILLSDILRVNTEITKAPLSASMIKRYDEHHQDLTLLKALVRQQLPEKYKEIFFDQSKNGYAGYIDGGASQEEFYKFIKPILEKMDGTEELLVKLNREDLLRKQRTFDNGSIPHQIHLGELHAILRRQEDFYPFLKDNREKIEKILTFRIPYYVGPLARGNSRFAWMTRKSEETITPWNFEEVVDKGASAQSFIERMTNFDKNLPNEKVLPKHSLLYEYFTVYNELTKVKYVTEGMRKPAFLSGEQKKAIVDLLFKTNRKVTVKQLKEDYFKKIECFDSVEISGVEDRFNASLGTYHDLLKIIKDKDFLDNEENEDILEDIVLTLTLFEDREMIEERLKTYAHLFDDKVMKQLKRRRYTGWGRLSRKLINGIRDKQSGKTILDFLKSDGFANRNFMQLIHDDSLTFKEDIQKAQVSGQGDSLHEHIANLAGSPAIKKGILQTVKVVDELVKVMGRHKPENIVIEMARENQTTQKGQKNSRERMKRIEEGIKELGSQILKEHPVENTQLQNEKLYLYYLQNGRDMYVDQELDINRLSDYDVDHIVPQSFLKDDSIDNKVLTRSDKNRGKSDNVPSEEVVKKMKNYWRQLLNAKLITQRKFDNLTKAERGGLSELDKAGFIKRQLVETRQITKHVAQILDSRMNTKYDENDKLIREVKVITLKSKLVSDFRKDFQFYKVREINNYHHAHDAYLNAVVGTALIKKYPKLESEFVYGDYKVYDVRKMIAKSEQEIGKATAKYFFYSNIMNFFKTEITLANGEIRKRPLIETNGETGEIVWDKGRDFATVRKVLSMPQVNIVKKTEVQTGGFSKESIRPKRNSDKLIARKKDWDPKKYGGFVSPTVAYSVLVVAKVEKGKSKKLKSVKELLGITIMERSSFEKNPIDFLEAKGYKEVKKDLIIKLPKYSLFELENGRKRMLASARFLQKGNELALPSKYVNFLYLASHYEKLKGSPEDNEQKQLFVEQHKHYLDEIIEQISEFSKRVILADANLDKVLSAYNKHRDKPIREQAENIIHLFTLTNLGAPRAFKYFDTTIDRKVYRSTKEVLDATLIHQSITGLYETRIDLSQLGGD

SEQ ID NO: 125 - protein, 229 aa, Artificial Sequence [sequence omitted]

SEQ ID NO: 126 - protein, 208 aa, Artificial Sequence; identical to SEQ ID NO: 5
  pmCDA1

SEQ ID NO: 127 - protein, 199 aa, Artificial Sequence
  hAPOBEC3A
MEASPASGPRHLMDPHIFTSNFNNGIGRHKTYLCYEVERLDNGTSVKMDQHRGFLHNQAKNLLCGFYGRHAELRFLDLVPSLQLDPAQIYRVTWFISWSPCFSWGCAGEVRAFLQENTHVRLRIFAARIYDYDPLYKEALQMLRDAGAQVSIMTYDEFKHCWDTFVDHQGCPFQPWDGLDEHSQALSGRLRAILQNQGN

SEQ ID NO: 128 - protein, 1711 aa, Artificial Sequence
  BE3
MSSETGPVAVDPTLRRRIEPHEFEVFFDPRELRKETCLLYEINWGGRHSIWRHTSQNTNKHVEVNFIEKFTTERYFCPNTRCSITWFLSWSPCGECSRAITEFLSRYPHVTLFIYIARLYHHADPRNRQGLRDLISSGVTIQIMTEQESGYCWRNFVNYSPSNEAHWPRYPHLWVRLYVLELYCIILGLPPCLNILRRKQPQLTFFTIALQSCHYQRLPPHILWATGLKSGSETPGTSESATPESMDKKYSIGLAIGTNSVGWAVITDEYKVPSKKFKVLGNTDRHSIKKNLIGALLFDSGETAEATRLKRTARRRYTRRKNRICYLQEIFSNEMAKVDDSFFHRLEESFLVEEDKKHERHPIFGNIVDEVAYHEKYPTIYHLRKKLVDSTDKADLRLIYLALAHMIKFRGHFLIEGDLNPDNSDVDKLFIQLVQTYNQLFEENPINASGVDAKAILSARLSKSRRLENLIAQLPGEKKNGLFGNLIALSLGLTPNFKSNFDLAEDAKLQLSKDTYDDDLDNLLAQIGDQYADLFLAAKNLSDAILLSDILRVNTEITKAPLSASMIKRYDEHHQDLTLLKALVRQQLPEKYKEIFFDQSKNGYAGYIDGGASQEEFYKFIKPILEKMDGTEELLVKLNREDLLRKQRTFDNGSIPHQIHLGELHAILRRQEDFYPFLKDNREKIEKILTFRIPYYVGPLARGNSRFAWMTRKSEETITPWNFEEVVDKGASAQSFIERMTNFDKNLPNEKVLPKHSLLYEYFTVYNELTKVKYVTEGMRKPAFLSGEQKKAIVDLLFKTNRKVTVKQLKEDYFKKIECFDSVEISGVEDRFNASLGTYHDLLKIIKDKDFLDNEENEDILEDIVLTLTLFEDREMIEERLKTYAHLFDDKVMKQLKRRRYTGWGRLSRKLINGIRDKQSGKTILDFLKSDGFANRNFMQLIHDDSLTFKEDIQKAQVSGQGDSLHEHIANLAGSPAIKKGILQTVKVVDELVKVMGRHKPENIVIEMARENQTTQKGQKNSRERMKRIEEGIKELGSQILKEHPVENTQLQNEKLYLYYLQNGRDMYVDQELDINRLSDYDVDHIVPQSFLKDDSIDNKVLTRSDKNRGKSDNVPSEEVVKKMKNYWRQLLNAKLITQRKFDNLTKAERGGLSELDKAGFIKRQLVETRQITKHVAQILDSRMNTKYDENDKLIREVKVITLKSKLVSDFRKDFQFYKVREINNYHHAHDAYLNAVVGTALIKKYPKLESEFVYGDYKVYDVRKMIAKSEQEIGKATAKYFFYSNIMNFFKTEITLANGEIRKRPLIETNGETGEIVWDKGRDFATVRKVLSMPQVNIVKKTEVQTGGFSKESILPKRNSDKLIARKKDWDPKKYGGFDSPTVAYSVLVVAKVEKGKSKKLKSVKELLGITIMERSSFEKNPIDFLEAKGYKEVKKDLIIKLPKYSLFELENGRKRMLASAGELQKGNELALPSKYVNFLYLASHYEKLKGSPEDNEQKQLFVEQHKHYLDEIIEQISEFSKRVILADANLDKVLSAYNKHRDKPIREQAENIIHLFTLTNLGAPAAFKYFDTTIDRKRYTSTKEVLDATLIHQSITGLYETRIDLSQLGGDSGGSTNLSDIIEKETGKQLVIQESILMLPEEVEEVIGNKPESDILVHTAYDESTDENVMLLTSDAPEYKPWALVIQDSNGENKIKMLSGGSPKKKRKV

SEQ ID NO: 129 - protein, 229 aa, Artificial Sequence [sequence omitted]

SEQ ID NO: 130 - protein, 16 aa, Artificial Sequence
  XTEN Linker
SGSETPGTSESATPES

SEQ ID NO: 131 - protein, 1368 aa, Artificial Sequence; identical to SEQ ID NO: 1
  nCas9

SEQ ID NO: 132 - protein, 4 aa, Artificial Sequence
  SGGS linker
SGGS

SEQ ID NO: 133 - protein, 83 aa, Artificial Sequence; identical to SEQ ID NO: 19
  UGI

SEQ ID NO: 134 - protein, 4 aa, Artificial Sequence
  SGGS linker
SGGS

SEQ ID NO: 135 - protein, 7 aa, Artificial Sequence
  NLS
PKKKRKV

SEQ ID NO: 136 - protein, 1690 aa, Artificial Sequence
  nCDA1-BE3
MTDAEYVRIHEKLDIYTFKKQFFNNKKSVSHRCYVLFELKRRGERRACFWGYAVNKPQSGTERGIHAEIFSIRKVEEYLRDNPGQFTINWYSSWSPCADCAEKILEWYNQELRGNGHTLKIWACKLYYEKNARNQIGLWNLRDNGVGLNVMVSEHYQCCRKIFIQSSHNQLNENRWLEKTLKRAEKRRSELSIMIQVKILHTTKSPAVSGSETPGTSESATPESMDKKYSIGLAIGTNSVGWAVITDEYKVPSKKFKVLGNTDRHSIKKNLIGALLFDSGETAEATRLKRTARRRYTRRKNRICYLQEIFSNEMAKVDDSFFHRLEESFLVEEDKKHERHPIFGNIVDEVAYHEKYPTIYHLRKKLVDSTDKADLRLIYLALAHMIKFRGHFLIEGDLNPDNSDVDKLFIQLVQTYNQLFEENPINASGVDAKAILSARLSKSRRLENLIAQLPGEKKNGLFGNLIALSLGLTPNFKSNFDLAEDAKLQLSKDTYDDDLDNLLAQIGDQYADLFLAAKNLSDAILLSDILRVNTEITKAPLSASMIKRYDEHHQDLTLLKALVRQQLPEKYKEIFFDQSKNGYAGYIDGGASQEEFYKFIKPILEKMDGTEELLVKLNREDLLRKQRTFDNGSIPHQIHLGELHAILRRQEDFYPFLKDNREKIEKILTFRIPYYVGPLARGNSRFAWMTRKSEETITPWNFEEVVDKGASAQSFIERMTNFDKNLPNEKVLPKHSLLYEYFTVYNELTKVKYVTEGMRKPAFLSGEQKKAIVDLLFKTNRKVTVKQLKEDYFKKIECFDSVEISGVEDRFNASLGTYHDLLKIIKDKDFLDNEENEDILEDIVLTLTLFEDREMIEERLKTYAHLFDDKVMKQLKRRRYTGWGRLSRKLINGIRDKQSGKTILDFLKSDGFANRNFMQLIHDDSLTFKEDIQKAQVSGQGDSLHEHIANLAGSPAIKKGILQTVKVVDELVKVMGRHKPENIVIEMARENQTTQKGQKNSRERMKRIEEGIKELGSQILKEHPVENTQLQNEKLYLYYLQNGRDMYVDQELDINRLSDYDVDHIVPQSFLKDDSIDNKVLTRSDKNRGKSDNVPSEEVVKKMKNYWRQLLNAKLITQRKFDNLTKAERGGLSELDKAGFIKRQLVETRQITKHVAQILDSRMNTKYDENDKLIREVKVITLKSKLVSDFRKDFQFYKVREINNYHHAHDAYLNAVVGTALIKKYPKLESEFVYGDYKVYDVRKMIAKSEQEIGKATAKYFFYSNIMNFFKTEITLANGEIRKRPLIETNGETGEIVWDKGRDFATVRKVLSMPQVNIVKKTEVQTGGFSKESILPKRNSDKLIARKKDWDPKKYGGFDSPTVAYSVLVVAKVEKGKSKKLKSVKELLGITIMERSSFEKNPIDFLEAKGYKEVKKDLIIKLPKYSLFELENGRKRMLASAGELQKGNELALPSKYVNFLYLASHYEKLKGSPEDNEQKQLFVEQHKHYLDEIIEQISEFSKRVILADANLDKVLSAYNKHRDKPIREQAENIIHLFTLTNLGAPAAFKYFDTTIDRKRYTSTKEVLDATLIHQSITGLYETRIDLSQLGGDSGGSTNLSDIIEKETGKQLVIQESILMLPEEVEEVIGNKPESDILVHTAYDESTDENVMLLTSDAPEYKPWALVIQDSNGENKIKMLSGGSPKKKRKV

SEQ ID NO: 137 - protein, 208 aa, Artificial Sequence; identical to SEQ ID NO: 5
  Deaminase CDA1

SEQ ID NO: 138 - protein, 16 aa, Artificial Sequence
  XTEN Linker
SGSETPGTSESATPES

SEQ ID NO: 139 - protein, 1368 aa, Artificial Sequence; identical to SEQ ID NO: 1
  nCas9

SEQ ID NO: 140 - protein, 4 aa, Artificial Sequence
  SGGS linker
SGGS

SEQ ID NO: 141 - protein, 83 aa, Artificial Sequence; identical to SEQ ID NO: 19
  UGI

SEQ ID NO: 142 - protein, 4 aa, Artificial Sequence
  SGGS linker
SGGS

SEQ ID NO: 143 - protein, 7 aa, Artificial Sequence
  NLS
PKKKRKV

SEQ ID NO: 144 - protein, 1692 aa, Artificial Sequence
  cCDA1-BE3
MDKKYSIGLAIGTNSVGWAVITDEYKVPSKKFKVLGNTDRHSIKKNLIGALLFDSGETAEATRLKRTARRRYTRRKNRICYLQEIFSNEMAKVDDSFFHRLEESFLVEEDKKHERHPIFGNIVDEVAYHEKYPTIYHLRKKLVDSTDKADLRLIYLALAHMIKFRGHFLIEGDLNPDNSDVDKLFIQLVQTYNQLFEENPINASGVDAKAILSARLSKSRRLENLIAQLPGEKKNGLFGNLIALSLGLTPNFKSNFDLAEDAKLQLSKDTYDDDLDNLLAQIGDQYADLFLAAKNLSDAILLSDILRVNTEITKAPLSASMIKRYDEHHQDLTLLKALVRQQLPEKYKEIFFDQSKNGYAGYIDGGASQEEFYKFIKPILEKMDGTEELLVKLNREDLLRKQRTFDNGSIPHQIHLGELHAILRRQEDFYPFLKDNREKIEKILTFRIPYYVGPLARGNSRFAWMTRKSEETITPWNFEEVVDKGASAQSFIERMTNFDKNLPNEKVLPKHSLLYEYFTVYNELTKVKYVTEGMRKPAFLSGEQKKAIVDLLFKTNRKVTVKQLKEDYFKKIECFDSVEISGVEDRFNASLGTYHDLLKIIKDKDFLDNEENEDILEDIVLTLTLFEDREMIEERLKTYAHLFDDKVMKQLKRRRYTGWGRLSRKLINGIRDKQSGKTILDFLKSDGFANRNFMQLIHDDSLTFKEDIQKAQVSGQGDSLHEHIANLAGSPAIKKGILQTVKVVDELVKVMGRHKPENIVIEMARENQTTQKGQKNSRERMKRIEEGIKELGSQILKEHPVENTQLQNEKLYLYYLQNGRDMYVDQELDINRLSDYDVDHIVPQSFLKDDSIDNKVLTRSDKNRGKSDNVPSEEVVKKMKNYWRQLLNAKLITQRKFDNLTKAERGGLSELDKAGFIKRQLVETRQITKHVAQILDSRMNTKYDENDKLIREVKVITLKSKLVSDFRKDFQFYKVREINNYHHAHDAYLNAVVGTALIKKYPKLESEFVYGDYKVYDVRKMIAKSEQEIGKATAKYFFYSNIMNFFKTEITLANGEIRKRPLIETNGETGEIVWDKGRDFATVRKVLSMPQVNIVKKTEVQTGGFSKESILPKRNSDKLIARKKDWDPKKYGGFDSPTVAYSVLVVAKVEKGKSKKLKSVKELLGITIMERSSFEKNPIDFLEAKGYKEVKKDLIIKLPKYSLFELENGRKRMLASAGELQKGNELALPSKYVNFLYLASHYEKLKGSPEDNEQKQLFVEQHKHYLDEIIEQISEFSKRVILADANLDKVLSAYNKHRDKPIREQAENIIHLFTLTNLGAPAAFKYFDTTIDRKRYTSTKEVLDATLIHQSITGLYETRIDLSQLGGDSGSETPGTSESATPESMTDAEYVRIHEKLDIYTFKKQFFNNKKSVSHRCYVLFELKRRGERRACFWGYAVNKPQSGTERGIHAEIFSIRKVEEYLRDNPGQFTINWYSSWSPCADCAEKILEWYNQELRGNGHTLKIWACKLYYEKNARNQIGLWNLRDNGVGLNVMVSEHYQCCRKIFIQSSHNQLNENRWLEKTLKRAEKRRSELSIMIQVKILHTTKSPAVSRSGGSTNLSDIIEKETGKQLVIQESILMLPEEVEEVIGNKPESDILVHTAYDESTDENVMLLTSDAPEYKPWALVIQDSNGENKIKMLSGGSPKKKRKV

SEQ ID NO: 145 - protein, 1368 aa, Artificial Sequence; identical to SEQ ID NO: 1
  nCas9

SEQ ID NO: 146 - protein, 16 aa, Artificial Sequence
  XTEN Linker
SGSETPGTSESATPES

SEQ ID NO: 147 - protein, 208 aa, Artificial Sequence; identical to SEQ ID NO: 5
  Deaminase CDA1

SEQ ID NO: 148 - protein, 6 aa, Artificial Sequence
  SRSGGS linker
SRSGGS

SEQ ID NO: 149 - protein, 83 aa, Artificial Sequence; identical to SEQ ID NO: 19
  UGI

SEQ ID NO: 150 - protein, 4 aa, Artificial Sequence
  SGGS linker
SGGS

SEQ ID NO: 151 - protein, 7 aa, Artificial Sequence
  NLS
PKKKRKV

SEQ ID NO: 152 - protein, 1700 aa, Artificial Sequence; identical to SEQ ID NO: 7
  BE-PAPAP

SEQ ID NO: 153 - protein, 229 aa, Artificial Sequence [sequence omitted]

SEQ ID NO: 154 - protein, 5 aa, Artificial Sequence
  PAPAP Linker
PAPAP

SEQ ID NO: 155 - protein, 1368 aa, Artificial Sequence; identical to SEQ ID NO: 1
  nCas9

SEQ ID NO: 156 - protein, 4 aa, Artificial Sequence
  SGGS linker
SGGS

SEQ ID NO: 157 - protein, 83 aa, Artificial Sequence; identical to SEQ ID NO: 19
  UGI

SEQ ID NO: 158 - protein, 4 aa, Artificial Sequence
  SGGS linker
SGGS

SEQ ID NO: 159 - protein, 7 aa, Artificial Sequence
  NLS
PKKKRKV

SEQ ID NO: 160 - protein, 1702 aa, Artificial Sequence; identical to SEQ ID NO: 9
  BE-PAPAPAP

SEQ ID NO: 161 - protein, 229 aa, Artificial Sequence [sequence omitted]

SEQ ID NO: 162 - protein, 7 aa, Artificial Sequence
  PAPAPAP Linker
PAPAPAP

SEQ ID NO: 163 - protein, 1368 aa, Artificial Sequence; identical to SEQ ID NO: 1
  nCas9

SEQ ID NO: 164 - protein, 4 aa, Artificial Sequence
  SGGS linker
SGGS

SEQ ID NO: 165 - protein, 83 aa, Artificial Sequence; identical to SEQ ID NO: 19
  UGI

SEQ ID NO: 166 - protein, 4 aa, Artificial Sequence
  SGGS linker
SGGS

SEQ ID NO: 167 - protein, 7 aa, Artificial Sequence
  NLS
PKKKRKV

SEQ ID NO: 168 - protein, 1660 aa, Artificial Sequence; identical to SEQ ID NO: 11
  nCDA1Δ194-BE3

SEQ ID NO: 169 - protein, 194 aa, Artificial Sequence
  Deaminase CDA1∆194
MTDAEYVRIHEKLDIYTFKKQFFNNKKSVSHRCYVLFELKRRGERRACFWGYAVNKPQSGTERGIHAEIFSIRKVEEYLRDNPGQFTINWYSSWSPCADCAEKILEWYNQELRGNGHTLKIWACKLYYEKNARNQIGLWNLRDNGVGLNVMVSEHYQCCRKIFIQSSHNQLNENRWLEKTLKRAEKRRSELSIM

SEQ ID NO: 170 - protein, 1368 aa, Artificial Sequence; identical to SEQ ID NO: 1
  nCas9

SEQ ID NO: 171 - protein, 4 aa, Artificial Sequence
  SGGS linker
SGGS

SEQ ID NO: 172 - protein, 83 aa, Artificial Sequence; identical to SEQ ID NO: 19
  UGI

SEQ ID NO: 173 - protein, 4 aa, Artificial Sequence
  SGGS linker
SGGS

SEQ ID NO: 174 - protein, 7 aa, Artificial Sequence
  NLS
PKKKRKV

SEQ ID NO: 175 - protein, 1656 aa, Artificial Sequence; identical to SEQ ID NO: 13
  nCDA1Δ190-BE3

SEQ ID NO: 176 - protein, 190 aa, Artificial Sequence
  Deaminase CDA1∆190
MTDAEYVRIHEKLDIYTFKKQFFNNKKSVSHRCYVLFELKRRGERRACFWGYAVNKPQSGTERGIHAEIFSIRKVEEYLRDNPGQFTINWYSSWSPCADCAEKILEWYNQELRGNGHTLKIWACKLYYEKNARNQIGLWNLRDNGVGLNVMVSEHYQCCRKIFIQSSHNQLNENRWLEKTLKRAEKRRSE

SEQ ID NO: 177 - protein, 1368 aa, Artificial Sequence; identical to SEQ ID NO: 1
  nCas9

SEQ ID NO: 178 - protein, 4 aa, Artificial Sequence
  SGGS linker
SGGS

SEQ ID NO: 179 - protein, 83 aa, Artificial Sequence; identical to SEQ ID NO: 19
  UGI

SEQ ID NO: 180 - protein, 4 aa, Artificial Sequence
  SGGS linker
SGGS

SEQ ID NO: 181 - protein, 7 aa, Artificial Sequence
  NLS
PKKKRKV

SEQ ID NO: 182 - protein, 1681 aa, Artificial Sequence
  A3A-BE3
MEASPASGPRHLMDPHIFTSNFNNGIGRHKTYLCYEVERLDNGTSVKMDQHRGFLHNQAKNLLCGFYGRHAELRFLDLVPSLQLDPAQIYRVTWFISWSPCFSWGCAGEVRAFLQENTHVRLRIFAARIYDYDPLYKEALQMLRDAGAQVSIMTYDEFKHCWDTFVDHQGCPFQPWDGLDEHSQALSGRLRAILQNQGNSGSETPGTSESATPESMDKKYSIGLAIGTNSVGWAVITDEYKVPSKKFKVLGNTDRHSIKKNLIGALLFDSGETAEATRLKRTARRRYTRRKNRICYLQEIFSNEMAKVDDSFFHRLEESFLVEEDKKHERHPIFGNIVDEVAYHEKYPTIYHLRKKLVDSTDKADLRLIYLALAHMIKFRGHFLIEGDLNPDNSDVDKLFIQLVQTYNQLFEENPINASGVDAKAILSARLSKSRRLENLIAQLPGEKKNGLFGNLIALSLGLTPNFKSNFDLAEDAKLQLSKDTYDDDLDNLLAQIGDQYADLFLAAKNLSDAILLSDILRVNTEITKAPLSASMIKRYDEHHQDLTLLKALVRQQLPEKYKEIFFDQSKNGYAGYIDGGASQEEFYKFIKPILEKMDGTEELLVKLNREDLLRKQRTFDNGSIPHQIHLGELHAILRRQEDFYPFLKDNREKIEKILTFRIPYYVGPLARGNSRFAWMTRKSEETITPWNFEEVVDKGASAQSFIERMTNFDKNLPNEKVLPKHSLLYEYFTVYNELTKVKYVTEGMRKPAFLSGEQKKAIVDLLFKTNRKVTVKQLKEDYFKKIECFDSVEISGVEDRFNASLGTYHDLLKIIKDKDFLDNEENEDILEDIVLTLTLFEDREMIEERLKTYAHLFDDKVMKQLKRRRYTGWGRLSRKLINGIRDKQSGKTILDFLKSDGFANRNFMQLIHDDSLTFKEDIQKAQVSGQGDSLHEHIANLAGSPAIKKGILQTVKVVDELVKVMGRHKPENIVIEMARENQTTQKGQKNSRERMKRIEEGIKELGSQILKEHPVENTQLQNEKLYLYYLQNGRDMYVDQELDINRLSDYDVDHIVPQSFLKDDSIDNKVLTRSDKNRGKSDNVPSEEVVKKMKNYWRQLLNAKLITQRKFDNLTKAERGGLSELDKAGFIKRQLVETRQITKHVAQILDSRMNTKYDENDKLIREVKVITLKSKLVSDFRKDFQFYKVREINNYHHAHDAYLNAVVGTALIKKYPKLESEFVYGDYKVYDVRKMIAKSEQEIGKATAKYFFYSNIMNFFKTEITLANGEIRKRPLIETNGETGEIVWDKGRDFATVRKVLSMPQVNIVKKTEVQTGGFSKESILPKRNSDKLIARKKDWDPKKYGGFDSPTVAYSVLVVAKVEKGKSKKLKSVKELLGITIMERSSFEKNPIDFLEAKGYKEVKKDLIIKLPKYSLFELENGRKRMLASAGELQKGNELALPSKYVNFLYLASHYEKLKGSPEDNEQKQLFVEQHKHYLDEIIEQISEFSKRVILADANLDKVLSAYNKHRDKPIREQAENIIHLFTLTNLGAPAAFKYFDTTIDRKRYTSTKEVLDATLIHQSITGLYETRIDLSQLGGDSGGSTNLSDIIEKETGKQLVIQESILMLPEEVEEVIGNKPESDILVHTAYDESTDENVMLLTSDAPEYKPWALVIQDSNGENKIKMLSGGSPKKKRKV

SEQ ID NO: 183 - protein, 199 aa, Artificial Sequence; identical to SEQ ID NO: 127
  Deaminase A3A

SEQ ID NO: 184 - protein, 16 aa, Artificial Sequence
  XTEN Linker
SGSETPGTSESATPES

SEQ ID NO: 185 - protein, 1368 aa, Artificial Sequence; identical to SEQ ID NO: 1
  nCas9

SEQ ID NO: 186 - protein, 4 aa, Artificial Sequence
  SGGS linker
SGGS

SEQ ID NO: 187 - protein, 83 aa, Artificial Sequence; identical to SEQ ID NO: 19
  UGI

SEQ ID NO: 188 - protein, 4 aa, Artificial Sequence
  SGGS linker
SGGS

SEQ ID NO: 189 - protein, 7 aa, Artificial Sequence
  NLS
PKKKRKV

SEQ ID NO: 190 - protein, 1665 aa, Artificial Sequence
  A3A-NL-BE3
MEASPASGPRHLMDPHIFTSNFNNGIGRHKTYLCYEVERLDNGTSVKMDQHRGFLHNQAKNLLCGFYGRHAELRFLDLVPSLQLDPAQIYRVTWFISWSPCFSWGCAGEVRAFLQENTHVRLRIFAARIYDYDPLYKEALQMLRDAGAQVSIMTYDEFKHCWDTFVDHQGCPFQPWDGLDEHSQALSGRLRAILQNQGNMDKKYSIGLAIGTNSVGWAVITDEYKVPSKKFKVLGNTDRHSIKKNLIGALLFDSGETAEATRLKRTARRRYTRRKNRICYLQEIFSNEMAKVDDSFFHRLEESFLVEEDKKHERHPIFGNIVDEVAYHEKYPTIYHLRKKLVDSTDKADLRLIYLALAHMIKFRGHFLIEGDLNPDNSDVDKLFIQLVQTYNQLFEENPINASGVDAKAILSARLSKSRRLENLIAQLPGEKKNGLFGNLIALSLGLTPNFKSNFDLAEDAKLQLSKDTYDDDLDNLLAQIGDQYADLFLAAKNLSDAILLSDILRVNTEITKAPLSASMIKRYDEHHQDLTLLKALVRQQLPEKYKEIFFDQSKNGYAGYIDGGASQEEFYKFIKPILEKMDGTEELLVKLNREDLLRKQRTFDNGSIPHQIHLGELHAILRRQEDFYPFLKDNREKIEKILTFRIPYYVGPLARGNSRFAWMTRKSEETITPWNFEEVVDKGASAQSFIERMTNFDKNLPNEKVLPKHSLLYEYFTVYNELTKVKYVTEGMRKPAFLSGEQKKAIVDLLFKTNRKVTVKQLKEDYFKKIECFDSVEISGVEDRFNASLGTYHDLLKIIKDKDFLDNEENEDILEDIVLTLTLFEDREMIEERLKTYAHLFDDKVMKQLKRRRYTGWGRLSRKLINGIRDKQSGKTILDFLKSDGFANRNFMQLIHDDSLTFKEDIQKAQVSGQGDSLHEHIANLAGSPAIKKGILQTVKVVDELVKVMGRHKPENIVIEMARENQTTQKGQKNSRERMKRIEEGIKELGSQILKEHPVENTQLQNEKLYLYYLQNGRDMYVDQELDINRLSDYDVDHIVPQSFLKDDSIDNKVLTRSDKNRGKSDNVPSEEVVKKMKNYWRQLLNAKLITQRKFDNLTKAERGGLSELDKAGFIKRQLVETRQITKHVAQILDSRMNTKYDENDKLIREVKVITLKSKLVSDFRKDFQFYKVREINNYHHAHDAYLNAVVGTALIKKYPKLESEFVYGDYKVYDVRKMIAKSEQEIGKATAKYFFYSNIMNFFKTEITLANGEIRKRPLIETNGETGEIVWDKGRDFATVRKVLSMPQVNIVKKTEVQTGGFSKESILPKRNSDKLIARKKDWDPKKYGGFDSPTVAYSVLVVAKVEKGKSKKLKSVKELLGITIMERSSFEKNPIDFLEAKGYKEVKKDLIIKLPKYSLFELENGRKRMLASAGELQKGNELALPSKYVNFLYLASHYEKLKGSPEDNEQKQLFVEQHKHYLDEIIEQISEFSKRVILADANLDKVLSAYNKHRDKPIREQAENIIHLFTLTNLGAPAAFKYFDTTIDRKRYTSTKEVLDATLIHQSITGLYETRIDLSQLGGDSGGSTNLSDIIEKETGKQLVIQESILMLPEEVEEVIGNKPESDILVHTAYDESTDENVMLLTSDAPEYKPWALVIQDSNGENKIKMLSGGSPKKKRKV

SEQ ID NO: 191 - protein, 199 aa, Artificial Sequence; identical to SEQ ID NO: 127
  Deaminase A3A

SEQ ID NO: 192 - protein, 1368 aa, Artificial Sequence; identical to SEQ ID NO: 1
  nCas9

SEQ ID NO: 193 - protein, 4 aa, Artificial Sequence
  SGGS linker
SGGS

SEQ ID NO: 194 - protein, 83 aa, Artificial Sequence; identical to SEQ ID NO: 19
  UGI

SEQ ID NO: 195 - protein, 4 aa, Artificial Sequence
  SGGS linker
SGGS

SEQ ID NO: 196 - protein, 7 aa, Artificial Sequence
  NLS
PKKKRKV

SEQ ID NO: 197 - protein, 1652 aa, Artificial Sequence
  A3AΔ186-BE3
MEASPASGPRHLMDPHIFTSNFNNGIGRHKTYLCYEVERLDNGTSVKMDQHRGFLHNQAKNLLCGFYGRHAELRFLDLVPSLQLDPAQIYRVTWFISWSPCFSWGCAGEVRAFLQENTHVRLRIFAARIYDYDPLYKEALQMLRDAGAQVSIMTYDEFKHCWDTFVDHQGCPFQPWDGLDEHSQALMDKKYSIGLAIGTNSVGWAVITDEYKVPSKKFKVLGNTDRHSIKKNLIGALLFDSGETAEATRLKRTARRRYTRRKNRICYLQEIFSNEMAKVDDSFFHRLEESFLVEEDKKHERHPIFGNIVDEVAYHEKYPTIYHLRKKLVDSTDKADLRLIYLALAHMIKFRGHFLIEGDLNPDNSDVDKLFIQLVQTYNQLFEENPINASGVDAKAILSARLSKSRRLENLIAQLPGEKKNGLFGNLIALSLGLTPNFKSNFDLAEDAKLQLSKDTYDDDLDNLLAQIGDQYADLFLAAKNLSDAILLSDILRVNTEITKAPLSASMIKRYDEHHQDLTLLKALVRQQLPEKYKEIFFDQSKNGYAGYIDGGASQEEFYKFIKPILEKMDGTEELLVKLNREDLLRKQRTFDNGSIPHQIHLGELHAILRRQEDFYPFLKDNREKIEKILTFRIPYYVGPLARGNSRFAWMTRKSEETITPWNFEEVVDKGASAQSFIERMTNFDKNLPNEKVLPKHSLLYEYFTVYNELTKVKYVTEGMRKPAFLSGEQKKAIVDLLFKTNRKVTVKQLKEDYFKKIECFDSVEISGVEDRFNASLGTYHDLLKIIKDKDFLDNEENEDILEDIVLTLTLFEDREMIEERLKTYAHLFDDKVMKQLKRRRYTGWGRLSRKLINGIRDKQSGKTILDFLKSDGFANRNFMQLIHDDSLTFKEDIQKAQVSGQGDSLHEHIANLAGSPAIKKGILQTVKVVDELVKVMGRHKPENIVIEMARENQTTQKGQKNSRERMKRIEEGIKELGSQILKEHPVENTQLQNEKLYLYYLQNGRDMYVDQELDINRLSDYDVDHIVPQSFLKDDSIDNKVLTRSDKNRGKSDNVPSEEVVKKMKNYWRQLLNAKLITQRKFDNLTKAERGGLSELDKAGFIKRQLVETRQITKHVAQILDSRMNTKYDENDKLIREVKVITLKSKLVSDFRKDFQFYKVREINNYHHAHDAYLNAVVGTALIKKYPKLESEFVYGDYKVYDVRKMIAKSEQEIGKATAKYFFYSNIMNFFKTEITLANGEIRKRPLIETNGETGEIVWDKGRDFATVRKVLSMPQVNIVKKTEVQTGGFSKESILPKRNSDKLIARKKDWDPKKYGGFDSPTVAYSVLVVAKVEKGKSKKLKSVKELLGITIMERSSFEKNPIDFLEAKGYKEVKKDLIIKLPKYSLFELENGRKRMLASAGELQKGNELALPSKYVNFLYLASHYEKLKGSPEDNEQKQLFVEQHKHYLDEIIEQISEFSKRVILADANLDKVLSAYNKHRDKPIREQAENIIHLFTLTNLGAPAAFKYFDTTIDRKRYTSTKEVLDATLIHQSITGLYETRIDLSQLGGDSGGSTNLSDIIEKETGKQLVIQESILMLPEEVEEVIGNKPESDILVHTAYDESTDENVMLLTSDAPEYKPWALVIQDSNGENKIKMLSGGSPKKKRKV

SEQ ID NO: 198 - protein, 186 aa, Artificial Sequence
  Deaminase A3A∆186
MEASPASGPRHLMDPHIFTSNFNNGIGRHKTYLCYEVERLDNGTSVKMDQHRGFLHNQAKNLLCGFYGRHAELRFLDLVPSLQLDPAQIYRVTWFISWSPCFSWGCAGEVRAFLQENTHVRLRIFAARIYDYDPLYKEALQMLRDAGAQVSIMTYDEFKHCWDTFVDHQGCPFQPWDGLDEHSQAL

SEQ ID NO: 199 - protein, 1368 aa, Artificial Sequence; identical to SEQ ID NO: 1
  nCas9

SEQ ID NO: 200 - protein, 4 aa, Artificial Sequence
  SGGS linker
SGGS

SEQ ID NO: 201 - protein, 83 aa, Artificial Sequence; identical to SEQ ID NO: 19
  UGI

SEQ ID NO: 202 - protein, 4 aa, Artificial Sequence
  SGGS linker
SGGS

SEQ ID NO: 203 - protein, 7 aa, Artificial Sequence
  NLS
PKKKRKV

SEQ ID NO: 204 - protein, 1648 aa, Artificial Sequence
  A3AΔ182-BE3
MEASPASGPRHLMDPHIFTSNFNNGIGRHKTYLCYEVERLDNGTSVKMDQHRGFLHNQAKNLLCGFYGRHAELRFLDLVPSLQLDPAQIYRVTWFISWSPCFSWGCAGEVRAFLQENTHVRLRIFAARIYDYDPLYKEALQMLRDAGAQVSIMTYDEFKHCWDTFVDHQGCPFQPWDGLDEHMDKKYSIGLAIGTNSVGWAVITDEYKVPSKKFKVLGNTDRHSIKKNLIGALLFDSGETAEATRLKRTARRRYTRRKNRICYLQEIFSNEMAKVDDSFFHRLEESFLVEEDKKHERHPIFGNIVDEVAYHEKYPTIYHLRKKLVDSTDKADLRLIYLALAHMIKFRGHFLIEGDLNPDNSDVDKLFIQLVQTYNQLFEENPINASGVDAKAILSARLSKSRRLENLIAQLPGEKKNGLFGNLIALSLGLTPNFKSNFDLAEDAKLQLSKDTYDDDLDNLLAQIGDQYADLFLAAKNLSDAILLSDILRVNTEITKAPLSASMIKRYDEHHQDLTLLKALVRQQLPEKYKEIFFDQSKNGYAGYIDGGASQEEFYKFIKPILEKMDGTEELLVKLNREDLLRKQRTFDNGSIPHQIHLGELHAILRRQEDFYPFLKDNREKIEKILTFRIPYYVGPLARGNSRFAWMTRKSEETITPWNFEEVVDKGASAQSFIERMTNFDKNLPNEKVLPKHSLLYEYFTVYNELTKVKYVTEGMRKPAFLSGEQKKAIVDLLFKTNRKVTVKQLKEDYFKKIECFDSVEISGVEDRFNASLGTYHDLLKIIKDKDFLDNEENEDILEDIVLTLTLFEDREMIEERLKTYAHLFDDKVMKQLKRRRYTGWGRLSRKLINGIRDKQSGKTILDFLKSDGFANRNFMQLIHDDSLTFKEDIQKAQVSGQGDSLHEHIANLAGSPAIKKGILQTVKVVDELVKVMGRHKPENIVIEMARENQTTQKGQKNSRERMKRIEEGIKELGSQILKEHPVENTQLQNEKLYLYYLQNGRDMYVDQELDINRLSDYDVDHIVPQSFLKDDSIDNKVLTRSDKNRGKSDNVPSEEVVKKMKNYWRQLLNAKLITQRKFDNLTKAERGGLSELDKAGFIKRQLVETRQITKHVAQILDSRMNTKYDENDKLIREVKVITLKSKLVSDFRKDFQFYKVREINNYHHAHDAYLNAVVGTALIKKYPKLESEFVYGDYKVYDVRKMIAKSEQEIGKATAKYFFYSNIMNFFKTEITLANGEIRKRPLIETNGETGEIVWDKGRDFATVRKVLSMPQVNIVKKTEVQTGGFSKESILPKRNSDKLIARKKDWDPKKYGGFDSPTVAYSVLVVAKVEKGKSKKLKSVKELLGITIMERSSFEKNPIDFLEAKGYKEVKKDLIIKLPKYSLFELENGRKRMLASAGELQKGNELALPSKYVNFLYLASHYEKLKGSPEDNEQKQLFVEQHKHYLDEIIEQISEFSKRVILADANLDKVLSAYNKHRDKPIREQAENIIHLFTLTNLGAPAAFKYFDTTIDRKRYTSTKEVLDATLIHQSITGLYETRIDLSQLGGDSGGSTNLSDIIEKETGKQLVIQESILMLPEEVEEVIGNKPESDILVHTAYDESTDENVMLLTSDAPEYKPWALVIQDSNGENKIKMLSGGSPKKKRKV

SEQ ID NO: 205 - protein, 182 aa, Artificial Sequence
  Deaminase A3A∆182
MEASPASGPRHLMDPHIFTSNFNNGIGRHKTYLCYEVERLDNGTSVKMDQHRGFLHNQAKNLLCGFYGRHAELRFLDLVPSLQLDPAQIYRVTWFISWSPCFSWGCAGEVRAFLQENTHVRLRIFAARIYDYDPLYKEALQMLRDAGAQVSIMTYDEFKHCWDTFVDHQGCPFQPWDGLDEH

SEQ ID NO: 206 - protein, 1368 aa, Artificial Sequence; identical to SEQ ID NO: 1
  nCas9

SEQ ID NO: 207 - protein, 4 aa, Artificial Sequence
  SGGS linker
SGGS

SEQ ID NO: 208 - protein, 83 aa, Artificial Sequence; identical to SEQ ID NO: 19
  UGI

SEQ ID NO: 209 - protein, 4 aa, Artificial Sequence
  SGGS linker
SGGS

SEQ ID NO: 210 - protein, 7 aa, Artificial Sequence
  NLS
PKKKRKV

SEQ ID NO: 211 - protein, 1652 aa, Artificial Sequence
  A3A(Y130F)Δ186-BE3
MEASPASGPRHLMDPHIFTSNFNNGIGRHKTYLCYEVERLDNGTSVKMDQHRGFLHNQAKNLLCGFYGRHAELRFLDLVPSLQLDPAQIYRVTWFISWSPCFSWGCAGEVRAFLQENTHVRLRIFAARIFDYDPLYKEALQMLRDAGAQVSIMTYDEFKHCWDTFVDHQGCPFQPWDGLDEHSQALMDKKYSIGLAIGTNSVGWAVITDEYKVPSKKFKVLGNTDRHSIKKNLIGALLFDSGETAEATRLKRTARRRYTRRKNRICYLQEIFSNEMAKVDDSFFHRLEESFLVEEDKKHERHPIFGNIVDEVAYHEKYPTIYHLRKKLVDSTDKADLRLIYLALAHMIKFRGHFLIEGDLNPDNSDVDKLFIQLVQTYNQLFEENPINASGVDAKAILSARLSKSRRLENLIAQLPGEKKNGLFGNLIALSLGLTPNFKSNFDLAEDAKLQLSKDTYDDDLDNLLAQIGDQYADLFLAAKNLSDAILLSDILRVNTEITKAPLSASMIKRYDEHHQDLTLLKALVRQQLPEKYKEIFFDQSKNGYAGYIDGGASQEEFYKFIKPILEKMDGTEELLVKLNREDLLRKQRTFDNGSIPHQIHLGELHAILRRQEDFYPFLKDNREKIEKILTFRIPYYVGPLARGNSRFAWMTRKSEETITPWNFEEVVDKGASAQSFIERMTNFDKNLPNEKVLPKHSLLYEYFTVYNELTKVKYVTEGMRKPAFLSGEQKKAIVDLLFKTNRKVTVKQLKEDYFKKIECFDSVEISGVEDRFNASLGTYHDLLKIIKDKDFLDNEENEDILEDIVLTLTLFEDREMIEERLKTYAHLFDDKVMKQLKRRRYTGWGRLSRKLINGIRDKQSGKTILDFLKSDGFANRNFMQLIHDDSLTFKEDIQKAQVSGQGDSLHEHIANLAGSPAIKKGILQTVKVVDELVKVMGRHKPENIVIEMARENQTTQKGQKNSRERMKRIEEGIKELGSQILKEHPVENTQLQNEKLYLYYLQNGRDMYVDQELDINRLSDYDVDHIVPQSFLKDDSIDNKVLTRSDKNRGKSDNVPSEEVVKKMKNYWRQLLNAKLITQRKFDNLTKAERGGLSELDKAGFIKRQLVETRQITKHVAQILDSRMNTKYDENDKLIREVKVITLKSKLVSDFRKDFQFYKVREINNYHHAHDAYLNAVVGTALIKKYPKLESEFVYGDYKVYDVRKMIAKSEQEIGKATAKYFFYSNIMNFFKTEITLANGEIRKRPLIETNGETGEIVWDKGRDFATVRKVLSMPQVNIVKKTEVQTGGFSKESILPKRNSDKLIARKKDWDPKKYGGFDSPTVAYSVLVVAKVEKGKSKKLKSVKELLGITIMERSSFEKNPIDFLEAKGYKEVKKDLIIKLPKYSLFELENGRKRMLASAGELQKGNELALPSKYVNFLYLASHYEKLKGSPEDNEQKQLFVEQHKHYLDEIIEQISEFSKRVILADANLDKVLSAYNKHRDKPIREQAENIIHLFTLTNLGAPAAFKYFDTTIDRKRYTSTKEVLDATLIHQSITGLYETRIDLSQLGGDSGGSTNLSDIIEKETGKQLVIQESILMLPEEVEEVIGNKPESDILVHTAYDESTDENVMLLTSDAPEYKPWALVIQDSNGENKIKMLSGGSPKKKRKV

SEQ ID NO: 212 - protein, 186 aa, Artificial Sequence
  Deaminase A3A(Y130F)∆186
MEASPASGPRHLMDPHIFTSNFNNGIGRHKTYLCYEVERLDNGTSVKMDQHRGFLHNQAKNLLCGFYGRHAELRFLDLVPSLQLDPAQIYRVTWFISWSPCFSWGCAGEVRAFLQENTHVRLRIFAARIFDYDPLYKEALQMLRDAGAQVSIMTYDEFKHCWDTFVDHQGCPFQPWDGLDEHSQAL

SEQ ID NO: 213 - protein, 1368 aa, Artificial Sequence; identical to SEQ ID NO: 1
  nCas9

SEQ ID NO: 214 - protein, 4 aa, Artificial Sequence
  SGGS linker
SGGS

SEQ ID NO: 215 - protein, 83 aa, Artificial Sequence; identical to SEQ ID NO: 19
  UGI

SEQ ID NO: 216 - protein, 4 aa, Artificial Sequence
  SGGS linker
SGGS

SEQ ID NO: 217 - protein, 7 aa, Artificial Sequence
  NLS
PKKKRKV

SEQ ID NO: 218 - protein, 1664 aa, Artificial Sequence
  nCDA1∆198-BE3
MTDAEYVRIHEKLDIYTFKKQFFNNKKSVSHRCYVLFELKRRGERRACFWGYAVNKPQSGTERGIHAEIFSIRKVEEYLRDNPGQFTINWYSSWSPCADCAEKILEWYNQELRGNGHTLKIWACKLYYEKNARNQIGLWNLRDNGVGLNVMVSEHYQCCRKIFIQSSHNQLNENRWLEKTLKRAEKRRSELSIMIQVKMDKKYSIGLAIGTNSVGWAVITDEYKVPSKKFKVLGNTDRHSIKKNLIGALLFDSGETAEATRLKRTARRRYTRRKNRICYLQEIFSNEMAKVDDSFFHRLEESFLVEEDKKHERHPIFGNIVDEVAYHEKYPTIYHLRKKLVDSTDKADLRLIYLALAHMIKFRGHFLIEGDLNPDNSDVDKLFIQLVQTYNQLFEENPINASGVDAKAILSARLSKSRRLENLIAQLPGEKKNGLFGNLIALSLGLTPNFKSNFDLAEDAKLQLSKDTYDDDLDNLLAQIGDQYADLFLAAKNLSDAILLSDILRVNTEITKAPLSASMIKRYDEHHQDLTLLKALVRQQLPEKYKEIFFDQSKNGYAGYIDGGASQEEFYKFIKPILEKMDGTEELLVKLNREDLLRKQRTFDNGSIPHQIHLGELHAILRRQEDFYPFLKDNREKIEKILTFRIPYYVGPLARGNSRFAWMTRKSEETITPWNFEEVVDKGASAQSFIERMTNFDKNLPNEKVLPKHSLLYEYFTVYNELTKVKYVTEGMRKPAFLSGEQKKAIVDLLFKTNRKVTVKQLKEDYFKKIECFDSVEISGVEDRFNASLGTYHDLLKIIKDKDFLDNEENEDILEDIVLTLTLFEDREMIEERLKTYAHLFDDKVMKQLKRRRYTGWGRLSRKLINGIRDKQSGKTILDFLKSDGFANRNFMQLIHDDSLTFKEDIQKAQVSGQGDSLHEHIANLAGSPAIKKGILQTVKVVDELVKVMGRHKPENIVIEMARENQTTQKGQKNSRERMKRIEEGIKELGSQILKEHPVENTQLQNEKLYLYYLQNGRDMYVDQELDINRLSDYDVDHIVPQSFLKDDSIDNKVLTRSDKNRGKSDNVPSEEVVKKMKNYWRQLLNAKLITQRKFDNLTKAERGGLSELDKAGFIKRQLVETRQITKHVAQILDSRMNTKYDENDKLIREVKVITLKSKLVSDFRKDFQFYKVREINNYHHAHDAYLNAVVGTALIKKYPKLESEFVYGDYKVYDVRKMIAKSEQEIGKATAKYFFYSNIMNFFKTEITLANGEIRKRPLIETNGETGEIVWDKGRDFATVRKVLSMPQVNIVKKTEVQTGGFSKESILPKRNSDKLIARKKDWDPKKYGGFDSPTVAYSVLVVAKVEKGKSKKLKSVKELLGITIMERSSFEKNPIDFLEAKGYKEVKKDLIIKLPKYSLFELENGRKRMLASAGELQKGNELALPSKYVNFLYLASHYEKLKGSPEDNEQKQLFVEQHKHYLDEIIEQISEFSKRVILADANLDKVLSAYNKHRDKPIREQAENIIHLFTLTNLGAPAAFKYFDTTIDRKRYTSTKEVLDATLIHQSITGLYETRIDLSQLGGDSGGSTNLSDIIEKETGKQLVIQESILMLPEEVEEVIGNKPESDILVHTAYDESTDENVMLLTSDAPEYKPWALVIQDSNGENKIKMLSGGSPKKKRKV

SEQ ID NO: 219 - protein, 198 aa, Artificial Sequence
  Deaminase CDA1∆198
MTDAEYVRIHEKLDIYTFKKQFFNNKKSVSHRCYVLFELKRRGERRACFWGYAVNKPQSGTERGIHAEIFSIRKVEEYLRDNPGQFTINWYSSWSPCADCAEKILEWYNQELRGNGHTLKIWACKLYYEKNARNQIGLWNLRDNGVGLNVMVSEHYQCCRKIFIQSSHNQLNENRWLEKTLKRAEKRRSELSIMIQVK

SEQ ID NO: 220 - DNA, 594 bp, Artificial Sequence
  Deaminase CDA1∆198
atgaccgacgctgagtacgtgagaatccatgagaagttggacatctacacgtttaagaaacagtttttcaacaacaaaaaatccgtgtcgcatagatgctacgttctctttgaattaaaacgacggggtgaacgtagagcgtgtttttggggctatgctgtgaataaaccacagagcgggacagaacgtggcattcacgccgaaatctttagcattagaaaagtcgaagaatacctgcgcgacaaccccggacaattcacgataaattggtactcatcctggagtccttgtgcagattgcgctgaaaagatcttagaatggtataaccaggagctgcgggggaacggccacactttgaaaatctgggcttgcaaactctattacgagaaaaatgcgaggaatcaaattgggctgtggaacctcagagataacggggttgggttgaatgtaatggtaagtgaacactaccaatgttgcaggaaaatattcatccaatcgtcgcacaatcaattgaatgagaatagatggcttgagaagactttgaagcgagctgaaaaacgacggagcgagttgtccattatgattcaggtaaaa
